United States Patent Application Publication US 2007/0009916 A1 - sequence listing, part 3

SEQ ID NO: 1689 - DNA, 26184 bp, Homo sapiens
  source
  (1)..(26184)
  CDS (201)..(967)
  CDS (1028)..(1263)
  CDS (1335)..(1440)
  CDS (3650)..(3871)
  CDS (4688)..(4998)
  CDS (5577)..(5681)
  CDS (6051)..(6294)
  CDS (7124)..(7322)
  CDS (7465)..(7586)
  CDS (8116)..(8851)
  CDS (11193)..(11481)
  CDS (11714)..(11817)
  CDS (12950)..(13449)
  CDS (24832)..(24995)
  CDS (25686)..(25984)
  modified_base (11964)..(11963): a, t, c, g, unknown or other
  modified_base (11967)..(11967): a, t, c, g, unknown or other
  modified_base (11970)..(11970): a, t, c, g, unknown or other
  modified_base (13688)..(13688): a, t, c, g, unknown or other
  modified_base (17473)..(17473): a, t, c, g, unknown or other
aaaaaggattagtattacttttttaatgcgatggcgcgggggggggcgggggggggcgggaaatggagtaggcagacttttgtctgattgtgtgagggtgggaagaaatgttatcagctgagaagatgaaagaaatggataattaaggtactttccagaccttagcaaggaagatgacagctctgatgagaaatctccctatgccgaggcttcagaagcagcccttccagcagagaaagtattcattagaaaaagaaggcaaagtgatggatggagtcagggtccagccagggtttgggaagaggctgtacagggtatcgatcgcagttctcaagagaagagagacagatcagcagagatgctgcaaacaccagctgcctcggggccaccccagttctggggctggctctggctcggagacagccttctgtcatcctgtcatcgtgacaggtgatcttggtcagcttggccaggtcctctcaaatccagacaacgccacgccaaccctctgctctgcatcagggcagcgtgggtttcccacagaggaggcacgacacgggagccgaggccctcccccacaccacccctgtgtccttcagcacctcctacagactccctccccttgcccttctgattcacagcgcccacctccctgcacctaccctattcgatctacaggggagcggagtcgcttcgtggccgccagcccgggaaggggcgccagccagctggcggacgcacggcttagaggggcgtctgggcagaaaggtttggggctggggagagatgcagtgagcttgggagagtggactggtagcacaaataatgtgtgcataagggttagaagaggaggtcctggagctttggtcttctcttttccccctgcaattgtgcatttcggagggactcttgctgcaagctcggtaggcaatagcatccgctccaagactacacttcccagaaggctgtgagtgggtggggggggggggcgcggggaacaggcaacctgtgttgcgcttgcgcaaagactgcgctggaaaggcaggtggggaggaggggaggcgtgcccgcgacggggcgagggggagggggccgcgcggcggcggcgccagggcgggcgcgcgtccgcggcggtgatggcggtgcgtgaacgcgcggcggcagcaatggccgctctggagcggcgggtgccgagtctcgatgacttcgcgggacagagctggagctcgtgggtggagcgggccgacctgcccgcggctgacggtgagtaaagccaccctaaagtccggggaccccatcactatctcccctccccccttccgggcccccgccagctgaggggagccgccgactggagccgccgtccggctccccggccccccaaacaaaggacccgccgggtcctagtgcccgcccgctccgtcaccttcgcgcctccgggtcctagcgccggctcaccgctcgcagcccaccctgccaacctctgcctctgccagtcgctaatacctgcccccatataggcttgcctttatctttctccttgcctgctgcccctcagctcgcgaccctcctgcacctgcctccagctttccctgtccgcaacagtcctccacgtgtttcccacgcaccccacttctgtgcccccttcctcaccccccttgttccttcgccttttgccccacacctcctgctccttttcggcatttgcctgcagctgcagtgcttttagacccccgccctctccgcgttagttcgtccgtccatccatctatcctccctccctccatccttcggtccatccatccatgcctccaacccactgtcctttcccaggcctcttgccctgcctcttggctctctgctcttactctcaccttctctaggcccctgagtgccttagtgagcgggcctacagccccttcttctgatctttgtcttctgggccccagggagcacctggcctcgtggcctttcggggtgacagcaggcatcacgcccctgaagaagtttgcaagtgagaagaggtggaggaggagactgcacggaggggtctctaatgacacttgttctcctctgagacatccgactcccagtttcgttctatccatcattccccgcacttgcatttaacggacttagagtgggagctgccccttgtctcttgtgtgcctaacccacgacccctcataatctggatattatataagattgtcaacaatcttctcatcctagaaaggagcatatctgttaatgggcatcagagagcagacctaagtgggagcccaggccaccctggggctgccccatgctgggtgggcaaagatggggccattgtcagggtctgggtgcattgagaaccggaaatggagtcagaccgggtttggtgactcagaattgatttttttttcccaagggacaggagggggcgtaaagaaggaggggaaaaaaaaaaaatggaggagagaggtagggggatggggaaaaagctgctttgcacagctaagatgtttttgtcattaacccagaaactgaggtacaagggcaacccctgcccaaaggccctctaagaaggggagggacttgcatagctgaccaaggagactttgaagatgctcaaggaccaaagacagcagtttctctgctctgtgaccatcctatcagtgcaggacctgagaagctgggtgtaactttgacaatgctatggtaacccaggtggagcaaaattgagttcatgggggtggggacctgggagagtatctatttgggatgccacatagtagcagaaaggacccatcgagaaatctcaagaagagactcagggacttatagaaacattggttaaggacggtttcccctttaaatggggaagcaggcccagaaaagagatgatacttacccacaatcacccaactagttagcagtggaaccctaaactgcaccttgaagtgaagggtcccataagaaaggtggatggattcttcttagtggggccatcttagtccagatgcagcaggtgaaggaagatgggcatttgagaatggacccactgaaaggttccccaagtggtcctagcaccaggagcttgtcacggagtgtgggcttcatactgttgagctgcaggccctgcttggggcttctggaaaggggacaacctctgggttgtcttctgggaagaacagtctctggtaaggagaggctggagactctctaaaactggccctgacccttctgagctgtgtttctcctctaggggctgagctggaggagagtagcaaaaacacgaagaagttggatgccatgaccctcattaaagaaggtgggagtcgacacacattagggctgggacccagggcagacaggaccacgctccacttttccaccacactacagaaggaggtggctgcttgaagcagctgtctggggaccctcattttgataggtccgagtcggccggttgttctggctcctgtgacctgtcgttggagatcataatcataggtgattgcccactcacctgaaagcgtataccctttgggactgcttagatcgaactctggaagctggaagcattcagcatggagcttgttatatcagcggggaggtgaagtgccttctgagtgtggggtgggagtgctctccgatcttccagagaaaccctgggatcttcagccccagtgacatgggcttctgtcattgcagacatgtccatcttcgggcactgccctgcccatgatgacttctacttggttgtgtgtaaccactgcagccaagtggtgaagcctcaagctttccagaagcactgcggtgaggggagccctagggaggagataaagggacaggggaaggtggagcatggaactctgaggacagggtcagttgggaggtctcgtagggtaatggagggtggtgttgaggataggaaggttgtgggggtggcttcagagcattgtggggagtcgggttattgtttgaacaaaattctagcatccagtggaattacgggaggagttaagacattcaggaagctgggtcttgaattttgagtcctaaaggctcagattcaaatgggaaggaggcatgtttacaatctaatttatggaaactcagattctctcatgtgagtctatggacatggttaggttggggaaggaagtggtgataccactcaccttgattattctttccacctcctggtgacagaaagaagacatgggcccctcagcaagctttatggccgggccccacccccacctccagcccctgccagctctcagaaatgccatgtagtgaatgggcagggcccagcttgtagggccccaggttccacgaaaacctcctccagggagaagggccaggggtcccggagccgtggccaccagcctcctgagaagacccagaaggacaacctctggtaaggagaggctggaaactttctaagactggccctgaccctgacccatggatgggctgacatcaatacagacagccctgggtcaaggcatactcctcacagcaggaggcagccgtcctgtctgcagcttccttccatatattccagggaagatggggtctcctcttcccgtgtttcacacccctgctggagcccacccaaattccagggctgggaaagagatggctctgggctagagtccaggccccaggcctcgcctcccctcccctccctcagccaaccccctctctctgtgtgtagccttttcgtgcctgtggtgaatctggagaagatgtccagtctcccgaagcctgatggacatggaatcagggtggccccaccctctgcttttctcagccagccagggggcctcaccaaggactcccctggaaaacctcccatggctcccccttctaaagaacctcctggcagagagaacatcgagatcatccccagtgaggggtccagtcactgggctgaaggcagccctcctgaaaaggagcccagtgggaccaggctgccccctaaaacccaccggaagatggctcgtgagtagttgtggtcttgggggtccagaatgtagagtggggactcctttgggctgctttgtccttgggctggatgaggaggaggtcaggtttatgggcctggccatcacaggttgtagggtataggagccccgtcacctcttgacctgcttgcttcctgggaagcttctctccatcctgtgtctcctgatcaaggctgagggagcccatgcccaggaggtgaagttctttctcactcttttctcacctagatccagggcgccagccagacacatctcacagctggcttctctggcctcccagatgcccatggctgcttttgtttcttgatgtgtgttgccctgctttgggcttgaagtcccaaaaggcgcacctgaaattgggatagggatggttctcacacccagcaaggagatgttgatgcccagaagtttatctggaaggtacagccccaggctgagggctggagtctcttctgccttagtaccagttctcaggcccttggcaggaagcggccaaatcctcctgtaaactcctggaaatggtcttgaggttcattggaagtgctttccccacagggaaggagtgcgacctcaacaggcagtgtggggtaataaatccagagaccaaaaagatctgtacccgcctgttgacctgcaaggtaacccccttcccactgcacggtgagggaggacagcacagggcttgcccactccttccctgggcaaagagaggaatgtcgatgttactgaaggtccagcttaagggagggcagttaggcccacccaagggaaggggagatgggtatgcccctcctgggcagaaggtgggaacagtgggaaggagggagtttccagattcccccatcccaaaggagggttttggccccatgggggaatgaaacaaagacacatgaacacagctgcaaatatgcccacctctctccctgccccccaacttgcccgggccaaagcaccctgccgtccctcaccccttctcagttcatacctactccccagctctccactctgctgtattctagatccactcagtacaccagcgccgggaagtccagggccgggccaaggactttgacgtgctggtggcagagctgaaggccaactcccgcaaaggggagtctcccaaggagaagagcccagggcgcaaggagcaagttctcgagcgcccctcccaggagctcccctcctcagtccaggttgtagcagcggtggctgctcccagcagcaccttctctgttcgtgccaagcagacctacccatactgtgcactgcccaggtacgtctagaatccaacccctacctcacctgggggtacttggcccctaagccatcaggggcccctggaaacaggctcagggagtgtcctggaagaggcactccctcagccctgagtgtgggggtattcctggggctcctgacagtggtgtggaagcaggagactcccctgtttccaaccaggcataccacggcaccccagcctctcggcagtgtgccagatccaacactcaggatatgaacattttcccagctgcctccaacagaccgaaacttgtcactggggagctgaaagggtcacactcctgggcaaggcagccctatgtgtattcactcactggccccttcgcgtgcagaggctatgccggaccccagggagagcctgacttgctgaaggagacacacatgcatctctgcctgtcacacaaggggcagacacgaaacacaggctcagctcacagacaggctcacaggaatatgtgatgcaagaagggggttgagcgagttgactgggctgaccagagctgggtacagttttaactgtgaagattttctggaggaggcggatctgcagcagattatcccctgaggaggaaggggctgggaggtgaaggggctggggagagaatcccttgggagcagtctctctgtctcttactctgtgagctgtgtcgttccctcctgtccttcccttccctctgtcctcttctgattgccctgcagggtgtctgccctggtgccctgctctttgagctcggcaggttcaaggatgcccctactctgaccccacaacagtcacattcccctggcatcccttttggcccttccaggtcccgggcctcctccgagagtgaattggatgatgaaggcccctgtggtggtgatggggacccaggcctgttccccttccccatgccccggggtgggacccaggcctccagcgaagagagtgaggaggaggggacatctgacgacctccacccaccccctgactgccattatgcaacccggcccccacggccacaggcggtaaggacctggaataggggcctatggagggggtggcccagcactcctggccaacaacatggggaggaggccagatcctgtgtgcagatgctgtctgtgcaccccagaccctgccaaccatgcaccttccttctgcctttagttctgcacctttgggagccggctggtgagcccaggatgctatgtgtttagccgccggctggaccggttctgctcagcactcagctccatgctggaacggcacctcagcacacacatgtggaagtaagtctctcggacccagaatggaagttctagaatggaaattcctaggttccagacatacttgggcttcagaagccctgatctttcctgtatacccataggtgtgccttggctatttgccagcaggaccccagatagggagtagcatgaaaaggaggtgggaaaacttggcagcctagagtttggctaaggcagggcatggaagggtggtctgggggtgaatctagactttcatccatcacttccagtaccttttgggtaactagggataggggatgcccaaaccaagatttaaaatgaagttcctagtgggctgcctcctagttagtaggtactagctaattcctctccacaggcacccctgtgtcttcttcctaaccctcagttccagcatctcccagcagatggcagcaactctggggctctgctgaccatttctaggtggggcagagagactggagtgtgtcttgtgttgggggaagctgtcttgtttcttggcagtcacagtggggctttctttttgctgcaggaagatcccaccggcagctgaacctccagctcaccttgtcaactccccgttatctgctcccctgagcccatcctctacaggcacctgcccccgccttccaggtccaaccctgagacctgcctgctcagcctccatgccccccaccaaggacaaccttgtccccagctaccctgcaggctcccccagcgtggcggctgcctgtagccaggcagagtgcatgggcgggagccaggctatcacctcaccactgcctgccaacacgccatccccgtccttcagcaagctgccgccttccaaggccagcaagtcatccaaaggcaaggacggggtggaggtggaggccccttctcgaaagcggaagttatcccctggccctaccactcttaaacggacctgcatcctggagcccactggaaaagggaaaccctctggctgtaggggcctctcggccaaaactaaaacagccctgagcatggggcttaatgggacaatggggccaagagtgaagcgggcagggcccctggactgtcgtggctcccctcatcagctccccacaccagtcaaggcttctcagctggagaaccggggagcagctggacacccagccaaggccctgccaaccaactgcctctctgaggaggaggtggccaagaagcggaaaaacctggccacttattgccggccagtgaaggccaagcactgtcaggctggtgcccctgctgatgtggcctgctctgtgcgccgcaaagaagccaggcccggccctggcctttgaggagaagtgctctacactgaaggtaccagccaggctccctgaagattgatgagggtggggcacacagggggtacctgatacagagaagatgctacattggtgtttgtgcagggaaagggaggaaggggaagttgagagagttcctggactgttttctttaggaagaggtaggtcagttcttagcaaagtgactccagctttttgcctggtgaaccttcccctatccctaaccctttcccttgggctgaggagatgcggcacccctccacccctgcttttgctataatcaaagggctacttctttctgaattggctgtgaccctcattccaggtactggagctacctctgttccctgaaggaaagggagtttgagtccctgggtcacagcctaacatgccgagcagcaaggtgggtgggctggtctcactggtttttcctctgggcatcagggccttgaagggcaggcacacaaccccatgtccacttatgcacatgtgcccacctccaggtgtgcaggtgacaggcaagttctccagggtttccagtaaagcctgcagccagttttatttgcctcttctggtgggagccctggtgtagtgtgctatgtgctctccatatgatctctgccaggagggacttactggaggtgggacgggggtgctctcctgggttagatgtgggcctaatcataaaccctgtgtgttctccagcttcactacccaggctgcccctggtgagctggcattcatcttcccccttgctcagttttactcaccaggccagcagaaggaaatcaagctttagcctctgtagtgcacacagttcactgggtaggacagctggtaggcccccaccctgaccctttctctcgcctcttgtcttcctgcagtcaaaagcccattaacgagaaagtgcctgcccactgcaacggagccgccagcacctcctcccctccagatccgggccccaggctgctgccgctttttataactttatattattttttttaagaaaaaaagctctttaaaatacctcaagactgtctccctgttctgttgctgctatgaaaatataaaaacagaaacatagaaaaggaaggaaaaaaaataacaaaatgagtgtccttactgtccccagccctaccctgggaggctgagatgataggcagccagactccagctcccatagcttgcctgcaaaagtctcttatgctcattattattattattgtcatcttgtcattttcaatagtgtgaaaaatgtttgtgtcactggggtagtctttccagacaggatgatgaggcgtgtggctctgaatgagtaaggcttcctgagtcttgacaccagagacgactatggtcccattgggaagagaaactcgagagggggagctgcacttctggctctttctaggatccttgccccgagggtctgggaattggcttgtgacccttttctggtccttcagcaaccctaggcatccatccctccctgaattattgcctgcttttcttcagctgttcctgcagcctcattttctcagccacttagggagcttgagctgggttggtcattgctgttgggatattcctgttttctattggacagccttccttccctgcctgtgggtttgcctttaaggaaggggtagaacctttcccagggaggcctccttgggttgaaccaccccttttttggaggcaggaagggaaaaggcatcatcacttgcagaactggtggtgtgggaggccacaggagtgtgggaggccttggtccttcaggatcacctggctcctcagggctgagcagctgctgaggaggcggcagggctgggagtgccctagtttttccatttatctcgctggggaccactcccgtgcagatgcgagaggagacttgcatttccctcctttggtccaccaggttcaaggcactatattttggcgatgtcctttcctattctccttgctcttaggcatggaggaagcttgttccctgaacaagacaaaatgaggtgacaggagacagtgcacagccagggaaatccagtactactagaaatcggctccaaacacttgtttcacagtcttggttcagcgtaccaagtgtgtgatttggggtttcactgaaatcgtttgccacgaaagtaatttccacaggctgcttgggatttaggcccttgtagacagacacacagatacaaatgaaggtgggctgggaactgttcggtccccttctgcctccgggctctcgcgggagcgggcctctccggggcactcgcgtttcccccccagcccccagagggcgctgtgggccactccgccgcactgccggcggcgtccccggggaggagcctctcctgcagccgccaccgcctccgcgatcgcaaacccggaagacgtgttcgggcagctggagtgtacgggcccgcgggccacggccatgcagcccctggaggtaggtctggttcccgctccagctggggagccgagactgacccgctggctgcggagaggcagtgggatcttggcgcacctggtagctttgggcttcaccatctttctgacagcgctgtcccggccaggaaccagtgagtgtgcggggcggggttgcggaagggggcggagtggagatgctggaggggcagcgcttgggagccccgggagacttggaggagggaccccagcagtaaaggggagacagaaacagtggagggattttgagggcctggtggggcggggccccagggatcctggaataatggggttttgggtgctgtgggggaagggcagacgattgaacagaccgaactacttcctcagaaacaggtcccctgatggaggatagaagtgaaggaggccgggcgcggtgggtcatgcctgaaatcccagcactttgggaggccgacgcgggtggatcacttgaggtcaggagttcgagaccagcctggccaacatggtgaaaccccgtctctactaagaatacaaaaattagccaggcgtgatggcgcgcgcctgtagttccagctacttgggaggctgagggaggagaatcgcttgaacccggaaggtgnagnctncagtgaaccgagattgcaccactgcactccaccctgtgcgacagagcgagactccgtatcaaaaaaaaaacaaaaaacaacaaccaaaaaaaacaaaaaacaaaaaaggggcagaggactgggctgccagctgagaggtgctgaacggggaacccgggccaaactgttgtatgtgtgtggataaggaggccctcttggttgctcaccctggggctccttggctgctccactttgtccttagttcctgtgcccgattaggattggggatggtacttttctcctgtggctagattctttgggttccacctagctacaggggcaggaacaatggtaccaagccctcagcctgttctctttgattcttaggtcttttctcctggcaccctgtattcatggccttggcggtgagtttaggcttctatctgatttgtttgggtattcctcacctcattctcccagggaagcacccagctttcagaaagctcagcctttctaaggctaagacaggtggaggaaacatctagggctcatctttccctgcagcctatgggattgggaaacctggagggctgggccataggcagttgtcagatggttgaaaagggcgggagggcatggaagataatttctttctccattggggccggaaaggagaaggggggagaggtgttatccggtcatctcccgacttgtccccaaagttcaggaagaagtttaacatttgctactccactggtcaagaaatgggagtcattgtagaggttgggatggggagatgtcaacctgaatgaggagacgtgcactcaagtgctgattcccaaatgttcccagaaatgttgagctgtgaggctggtggtcctggttgaacttatttaacccttaccctttgtcctctttgttaggatgtatgagagcacctcctttttctcaggcctccaagccagacatgaggcttactggctctctcctatgttcacagttctgcctctgcatggctgaagccatcctactcttctcacctgaacactccctgttcttcttctgctcccgaaaagcacggatccggctccactgggcagggcagaccctagccatcctctgtgcagctctgggcctgggcttcatcatctccagcaggacccgcagtgagctgcctcatctggtgtcctggcacagctgggtgggagccctgacactgctggccactgctgtccaggcactgtgtgggctctgcctcctttgtccccgggcagccagggtctcaagggtggctcgcctcaagctctaccatctgacatgtggactggtggtctacctgatggctacagtaacggtgcttctgggcatgtactcagtatggttccaggcccagatcaaaggtgcggcctggtacctgtgcctggcactgcccgtctatccagccctggtgatcatgcaccagatttccagatcctacttgccgaggaagaaaatggaaatgtgagttcctgcgaacgctgaatctaggtgggacgcttgccttgaacatcatggttcctttggtgatctataagggatctatttaagaagtggtcaggttttcgcacttcttggctggtccagggactgcagaaaccaaagctgctattgttgaggaataattcagtgggtcaaaatggggagatgtactgggtatgagtggaaggtgatggagagcctgatcctgaagcctttacttnatgagagacagagttttgggtgagtgatagtcatgtgctggtggtcattttgtagtttgtgtacataatgggtttctccgttcttgtcagttaggtatggcattccatggatattagtgttacttctactacagcattgtaatagtagtggagagacaccattgatctctacgcatcgtatacggtcgtctacggttcagttggtctcctaagcccatgggtcttatttatgggatatggtcctcttaggctctgttgtacaaccttaggtacattccatatcttaagaccactgtttcttcatctgtgaaatgtttctaaacaatctctaagtcccttccttctctaatatacagcgtctgtcaggtcgatgtctcagaacactctcccagctgtggaccacgtggaccacttagcagactcagggggtagttctttactctccctttactaccctggagggacagctctgcccttgaggcccttcagaaatttgtgctgatttggtccctgtgccagggcacagggggtcaggcactgtggaaagaagggactcaggtgagggtcttctggactctaagacggtaaaggcactaaagtcactttaaagcttttggagaagcaggagggcattggcttaaccaagccgaaggctgctggctgggctgcctagcccagctaagatcttccttcagcccacctcaggatccgggcttgagggctgcagggcctgcgtgcgctccctcccccgaaatcacttctcagggcaaaggagccccaggcatctcatgctttgcccttcttagggctcaggttcttgccttagcacatagcttctgggagcttttttgaagcatttcataagggccaaggaagtggggcagggcttttctgatccaaagaaaacaaagtttctctggttacccctcttcccttgttatctaagctttcctcagttgtcatctcttcccagctctttggtccaagagggggctgagtttggtgccagctggcaaatgagggctggactctcttccctccagagaccaccccgctccttgctgcagctgaaagtagttccccaggctgccctcggtggtgaggactggatgctagactgctgagctgtggtctgggctcagttgagaagataggatctccctagatcatggcaaggcctgacaacagctgagccaggaaagtgctgctgaggcaagtcgacatagctcacagggaactctgggaagcctgggatgtaggcgctggagctccagttcccaggagcaggggcaggtgttcctagatgttagtgttgtggatgtccttggtcttctgaagattcaggtcctcctctccgggtagcttagaagtaaggaggttggtttgattcaatagtatggggacagaatggggacagcaagggcagaagtgtcctctccacgtaactcattatgcccctcctgggggagattgcatctccaggacaagcatctaaaggaggcccctgctgtgcagaggggtattgttcctgtctctttcattgtcctccctcctctcaaactctccagtgtggtgtgaactcagaagaaacggttactggggctgcatggagaatttcacctgcggtgattttgatccagggactgcatctcctctttcctcatcacagccagtgctgagaggctccttctacctgccgcagggtaggagggccaggcaaagttcaccagcttgctctaagagcaagcaggcaatgccgtaaagcctgagcctgcctgaggtgctgcctcctcccaggtggtgcgggggctggtgggcgggcgggcaggcgtgctgacagccggcagtttgcgtgggctgtgccatctgatgtctattcccagccctgggaggaagggggagtcatttatattctgcaggaggaaggggccccagctgtcgcctttctgaccagcaggcctggagggcaggggcacagagcagagaggagggcactggtggtctcctgcttagcctggtctgactgcagtgtagggaataggtcaccaggaggagcccttcatcctggcaggccggattgtggagggacttccctccccctcttttccatttctccctccatcaccacctgccctcacatcctggggcagcagctggacagccattagacctcagtgccagggcactcttcctccagctgggatctcagtggctcccagctgcatgggctcctgcttgtgtgttccctcctccgccatcctctgttccccgcacctcccttattctgctcatgtctggggtattcacttggctcctcagcaaggaagcaaacgccttggaggagaagcacatggttgcccttttgtccttgctccctggctagggaaagctgctagtggtcagcctgttttgccttttttttaaaaaaaaaaaagccagggcagggtgcttagattttaaaaatttgcgtgtcatttgcacaaattttcatatcaagctaagtcctgattccaaatttgattatattccaaatttgattatattccaaatttgattatattcagattcaaccttgaggacattagaaatatagatggcttctgtatccaaatctgaatggaaatgagattacccttctgggttcagatacccctcccaagcccccgtcttttctgtaaccacccctcctctgagccccatcatggctggggttggtatggaatgggagcagctctgtatctggggaagtcctccagcctcaccttcttggctcttaagtggtaggctgttaccacttgccagcctgggcctcctctctccccaccctttcacaaggcaggctgcccttccgcactcactggcccatcccttctttctcatcgtcccacccttccacccccgtgcatggctgctgtaggtctggtttttttggtttttgttttttttaagacggagtctcactctgccgccaggctggagtgcagtggcagaatcttggctcactgcaacctctgcctcccgggttcaagagattctcctgcctcagcctcccgagtagctgggactacaggcacgtgccaccatatccagctaatttttgtatttttagtagagatggggtttcaccatgttggccaggatctcttgacctcgtgatctgcccgcctcggcctcccaaagtgctgtgattacaggcgtgagccaccgtgcctagccaggtcttgttttgaaaacctcactgtgggagattcaggcatcctccctaagccagctggccgctgtgctaaagcctgttcagagttaataataatcattagctgaatggtgctggggcctttcagcttcagatctctaagcacttgcaggctgagtcagtcagccctcatcttccccctccttcctgggctgcagagtgtaacagaatgggaaggcactgtgggaaggaagtcaggaatcttgctgctagccacgccttgcagtgacttctcgtctgggagtgggcactgagtcctctcagtaaactaataagacttgcacctgacaaaggtcaagatatgtagggaacacagtgtatgctaggctgagacctatggtggtggcaggggtggctgttgagcctgaacttccagtactcctgcccttccttctgtttacctggcttggcctacagggggcacccctggtcttgatgcctcaagcccagcatttctgggtcccctctgcagctcagagagcagggaggcttctggtagtgctcttgatgctcctgtgtctggttggcacanagatcctgtgtaacatgaaatgaaaggtgcatcagcttgggggctgggaaacctgcagtatgggtttactccgtccctatcactggtgtggctgtgggcaaaccacttattgcctgacctacctcacagggatgttgtgagggtttgatgagagaatgaatgttaataggaattggaaaattcaaagcattaaacacatgtaaacaggtggtattattatgttcttgtccttctctttcactgagccaggctttgggctttatgcttcttaggcaataaacagttatggataatgacaggggatctaagtctcagagagttgttctggccatcataagaaaacatggacacatttcttccttccagatgcaaggtcagctcttaccaactcctgccagaaatgccaccacggccatgactagtgaagtttgccgtaagtgctgcctacctggtgttcccaaatcacagggcagactgcagatctcggagtcagtacaattcctccctaggtccagcctgaagttcctggagctggtcttcgtagggagctgcaggtcacaagtctatctaaatctctcctaattctgcccttctgagggaaaagtggagcagacaagctaggaagggaggagcaactggagcaaacagcatcgccacagaccctctgtttaccgaagccacagaatgagcaacacctgcctcaggcattggagatgcagagcagggacccctggcttcccagggtccacagcctggtttccctttccccatttcaggctcgtggaataggatcagtcccctcctcctccaagtgctttattggcattcacatacacacacacacacacacacacgcacacacacacacactgaaagcagttctgtttaagttttaaattggggaagaatactttccattccatttgtctgagagcagcagcagtctgcctggagtggatgcaaagaagcaggaacagcaaaacagcagtgcagaggcttgaatattcgttttttatcttaattgctttttctgtcctgggatccaggaatgaaacactagtcaggcattgtgtgcagagcctcagcagttctcaccagcactgcacaaagacgacaagctgaaaggcagaactgccctggagggtggtttgaagtagcccgtctccagcatggcgctgggcttaaccccttcatgtaggcagaaattacctccagtgaggggaccttccccctacccacccactcaggagactcagctagtcaccagatgcatcacagaataacaatctcagtttataatcctgctattgctaggatttcccagatgagtttttaacctctgttggaagcagattaaggaacgacttcaggctattcagtggcatctgaggagccaactctgtctcactgagtatacatgagtggccccctagcacccctatctttaaagcagatacccagttatctcatggtgctttctaaggatgctcagttctgctcaggccccccaaaagcaaactatgaccaagtgagggagcggtgggaggtaagggaaatgcagcacaaagtacaatccaactccagtacttgccaacctgtatgtgtgcgcacatgcacgcatgcaccagccttggaggcaatgactcctgcctaatgtatgccagtgccaaagggcatccagaagtcccactgcagggctccacgtcctggctcactgcaggttggttctctcaggccatggttccaaccagggagagtaaacaagctgactagattggaggcgtcagggcaggtctaagtgtcttcaccattttgcattttccacctaagagtgtagaagcctgatgaaggggcttgactggcagctgctttagccttcctctctcaagccccaggagaggaagcattcagcacaggctgactgtgactagaccagaaaagccaaccgtcccactgcaggggcctgagccttttctgctatgtgggtggagaaagtgaagcttccccactggtttcctgggagatacaagataagtggtgcaagaagtgcatgcagaaagggaaggagttgagagactggggggaagagaggccaggttaaccaatgcactgaactcttacctattctcaaagaaaactgtcatattagcctcctccctccccgcaagtgctacctaagaggagccagggtaagtgctgcaaggcatggcagacaaaattgcacatcttggccagaatctaaggaacttcttgtggtttgggggaggtggtgaggatgtgggtggtgggtgggtggggggtgttgaagagatgcagccatggacttccttgggcttggcacaggccaaaacagaagagagaactccaaactccaagtagtcctcatcagacttgctctccttatcagcttcatcctgtcagccaaattgtcagccatagaaaaactgctttgcagatgaaaaactatataaatgcagagtatgggagtgctctgacatcaacagctgtcatttcactgactgccaaggttgacttgtctgatgtggctggttgtgcagtagctccacccctcgtcaccttggttgttcctcctgaagtgaaaaacaactttccaaatagaggagggctgcccttcggtcaagactttaggtaagtattcaaattcgcattcttttaatttttttcctggtatcatttcctctccctctttggaatctgccacgacagcccccttctagaatcaccaagagaggagccaaagaatcagcatggttagagttttagagtccagtccaatttctggtaggctgaatctgtaccaaaacgtagggactgcatttttctgttccacgcaatgcctaggacacactaaactgtcaaggaagattaacctgcccattaggtgaatatacttttagcctaagatggctaccatttacaacatgaaaatactgataataaaattctgtgaaagtgagctgctgcccaccattttttaaaacccaatccaagcattttttccatggtatggtcagtaggcttgatccagacttttaagagaactcggcagggaggcaaccctctgccctagggatccaggaagacttcattatctacaagcctcagcgagcgccaagtcatgggatttctaaactctaaagcttcagtgacatttgagaatcttaggggtcagcaaagtatggtctgttggtcaaaccagcccccctgcctggttttatgtggcctgtgagctaataatagtttatatatatatatatatatatatatatataacattttttttttttgagatggagtcttgctctgttgcccaggctggagtgcagtggcgcgatctcggctcactgcaagctccacctcccgggttcaccccattctcctgcctcagcctcctgcgtagctgggactacaggcgcccaccaccacacccggctaattttttgtatttttagtggagacggggtttcaccgtgttagccaagatggtctcgatctcctgaccttgtgatccacctgtctcagcctcccaaagtgctgggattacaggcgtgagccaccgcgcccggcctagtttatatattttttaatgcttggaaaaactcaaaaggcatgttaaaatatgaaattcaaatttcaatgtccataagtcaaatcttttttggaccacagccacagtcattcatttttgtcctgtctgtggctacactcaagctatagcagcacagctgagttgtaacagagactgtgtggtctgcagagcctaaaatatttactatctggctcgttagggaaaatgtttgctgaccccggtccatcttaatgcctagatgtgtatttcacccatgtccgtacaatagcacttaaagattttcttcctagataggacacacccttctgaggtacagtgaaccccacccacaggctgaaaaaataaaccagtcagattgtgccagaacagagactcaagccaggtttaatgatcattgtctagttttcagagcccagaggctccaagatttgccagcctaggtgtacacaagtgggaggaatggggtcttggacacgggaggcctgcttgctttgtcagcagagctacgaggaagtacagaggtaagaacacacagaaaactggatccatctgctttgctctccccagctggggtgtaccctctcctggcccctttcttgggccccataaatacaaaataataataataataataattacacagattgtagagccctgtcatcctctgtctccagggacacctgcttcctgggagacatgtctggtttatgggtgtggggtagggtaagaggaggtggtgatctctcggccttttcttatacccacacctggcagttttcaacacagggttctagtgcgcttacatatgctgattattcaattctccaattaaaaagctacctttgggttctatcacctgaaaccacgggaagaaacaaatcaaatctcttggtagggcagccaggtacatctaccaggtgtctcaaactcaaggccaaactagtggatatagtcaggagacttaagagccacagggccttttctcattccctaaactgggtaggaattatgaagaaaacggccctcccagtcctcaggagctccatcacgatgccccagaaggcctgcttcatttaacgctcactttaaagatcttcagagccctagatggtgccaagcggggagactgcagcatggagatgagattttcccagatttcctgatgagtctgaggagggagtcctagttcctatagctccagtaacaaaattctcaggagtctctggaataaatcaagacaacttttctctcctgaggacagttaacaggaagagcagctcacagctacttagccccttgccagtttccttctgagtccttcaatgacctagttctatcttaattgctcatatattgctcatatatatagtcttcacgggaggtttctgaggagtccaaagaaccaggtagctccttaccacctcttctcccaaggccttcaacccatggttcttctaactccagcctgggcagaaaagtgattcagtgccatggagatgtgggtgaagcttcagggagttcagaaatgaaaatacaggagtgtgtatttgaagagcctggcatggtcactgtctctcctaaagaggaatacaattgtgtgcatgaagttgtgcacattggtggagaccattctgagagtatcattaatggggactacagattcactgtcctggtggaagtcaaggtgctggtgtgcatgcatacctataagcatgcatacctatgagcatgcaggtacttgagggaaatgctgcacctctctctcaacaaaactaggttactaataaaggatggacagcagtcttgagttcccaggaccagacaaggggaagatgttgagtccccttccccaatcataataggaagcttaatagtcaggccctccaagcccctcacccacaggtaaatgacacctcttagaatgtaaaaagaggtcagaaatctagaggatctggagaacttccaatggactagaaacgtgggagagaagagaccctaagaaaaaccaacatcagagaacattttcaccttcaccctgctcatcccccgccaaagctcagagcagccactcacagggcatgcagtgtagtcaaagggaaaggttaaagggatcggtcatctccatactcaaagtattctgcaaccttggatggaatggaatgttgagctcattcttcttaagttcctctggcctcacaaccacaactgcaaagacctctcgatggaggaatggggtggcagaactccccttctgaaagtttagtactactgattatctctgcttcaggattgcctggaatctgtggagagggcagaacttgaagctgcactccaaattgccattctggggtagagaccacccaattccaacccttctgatgtcaaaaccccatgctttgactttgcagcagaggtggtatctctgagaggagcaaggcaaccttgtccacacagaggagatatatactggattttcactatcgccaagcctactctaagccagctggggccaggctttcttggactcctccctttacagagcagcatattagggaaaattcagaatcccacctgagcttgataaggagactggatgaagagatggcatacattgagaatcagctaggtccagctggatgctacataatagaggctgatttaccttcatccttctatcgtgaagtgggcccatgtaccacgtctgtggcaggcatccataaaagctctgccttcagcagcccccactctggcctgacacacagatgctgggaatcaaatactaaccaagggtttcaccaaccagggaattagcctatctggaattcaccccccatctacaagtttcgtgctggcacctatgctgtgacatggacccttcagttcatgctataaccctctgtgccattggtcccaggacaaggcacagataccacatcccacattgctgttgtaactaaaaggcagcaggccaggctcctgcaaagatccatccacccagggcacatcaggaaaaaggaaggctttaatgcaaagtcttacaacagctttggggaattgttaccgattgaggtctcagccttttcctgactcattttccaaaggttttcaacttccccagctgtgaagtttgacttgctaaacaaagaagatactacagcttttccccagtgtggctcctgtggaagctcccccaacacacacaacatcacaggtgtgggtgggcagagatagaaaaaatttttttttctaaatgtttttctcttaaggagctagggatgacctcatgaaagtttagggaatctgttcttcccctcactccttcctcattcccatccaactcagacatgcttctcttcctctaccacactgagaattggcagggctttgggtacgggtgtagcatttgcctgaggattaatatacccccatttgaaaatcgtggcagccacgccctgtttggggtcttgctctctgttgtacctgggaccaattcccttgaggtcaggaggaatccattcccttgggcagccagccctctcttccatcccctcatatccttcaggggtgcattacctctcctggggcagaatctccccaccaacccatcctgctcacaccacaatgggcgtatcagagaagaccgagctgactgattctggatccgacatcctccgttggcccttgcctgtggcctcaggcactggcagggtgttgcctggcttgagcttgccgttttgaccctgcccaggtccagcaggttccaggaaagccacccgccggtcaaaaccatcatctttgtccccaccagccataggatcatggttgggtgtggtactaagcatggaagagctgaggctgtctccttgatggctggaaggcttctctacaccccggcaccagcagcggcaaggggtgaggtataggtatatgaggaccaggaccacactaaggatacagcccactagggtggtataggctgtgttgagggtgtcatggtgtccgtgcaaggtgaaattgtgcactttcaattccacagacagtgtctcattgaaagtctctcccatggcatagcaggtatacacaccaccgtcctcgacctgcacctgctggaaaagaagactgccatccttagacacactcactgtgccattggtcacctcatctagcacccgttcattacttggtgtcacccacaccttggtcatcccttgctgcttggtgtcacacttgatgatcaaggtgtcacccaggtgggcctcccaggcacgctccttgtactcgccacagttgaggaaactcaggttgaagacattgtgcagcttcttggagttcatgcagtacagatcctcttgaaagtccatcacggagctcagctgccgatactgccagtgtgaaaacagctggtagagctcacagtcgcagttcagggggttgttatgtaggtacagcccattcttgatccaggccggcagcttctgcaggtcaggcaatggcaagttcttcagcttgttagaagagagatccaggagcgttagtttgggtagcttggctccttccttgaccagttccagagggaagcgagagatctggttctggctcaagtagagtttctgcagctgggccatgtcatcgaaggcgcaccggtccaccgccatgatgtggttattgtagagcagcagcacctccagtacttgcaggtcactgaacaggaactcatccagtgtacgcagctggttggaggagaggtccaggtagcgcaggttgggtaccggggaaaaggcctcagaggagatgaagttcaggtggttgtggctcagcagcagggagtgcagttgggtcaggcgcgtgggggtccactcggcccgcaggcggctcaggttgttgtgactgaggtccagtagtgctgtgtaactgggcaaggaatggggcacattgggcagctgctgcttggagcagctgaggatgttgctggcgcacaagcaggcggcaggacagctaaccacggctcggccagctctggccacctcaaaaagcagcagggacaaggacggcagcaggagccagaggcctctcgggtcacggtgggggtgcatagtgtcac

SEQ ID NO: 1690 - protein, 1467 aa, Homo sapiens [sequence omitted]

SEQ ID NO: 1691 - DNA, 10321 bp, Homo sapiens
  source
  (1)..(10321)
  CDS (201)..(267)
  CDS (1110)..(1244)
  CDS (1742)..(1902)
  CDS (3204)..(3343)
  CDS (5096)..(5244)
  CDS (5325)..(5621)
  CDS (6428)..(6589)
  CDS (8072)..(8872)
  CDS (9567)..(9764)
  CDS (9865)..(10121)
tgatatccaaccaaggtagagtcacaggtgaagtggacagctcctgatactcctctacatgttcacatgttcacagccatctctaatcctcttcctgtcattcttttctccacgtcctcccttcccccagcaaagtccaggttctctatggggggacagacctgtttgactatgaagtgcgcaggacgttcaacaatgacatgctcctggccttcatcagcagcagctgcattgctgccctggtctacatcctcacctcctgctcaggtagggcttctctcaagccagccccctcctcccctcccagggtgctcctgtctgcccagagcctgccttctcaagaatgctgcaatactcttgagcccagcatgtcagagctggggacacagggatatgcacacaaatcatcttccaaccccaaacaggcagactgaggcctggaggcaggttgggctgtaccagcccgggtcacaccctctaccctgggcccctgcacagttggaccttttgcctgttgaccatctttctcctattgatagccttgtgctggggagtctggggtattgtattcctttgtggattactttgtagcctattttggagtcccaagtcaactgccatctgccccccgatcactttttcacctccgtgtgcccctggatactagctgctgcttactcctgtctgtatacagtaggcacactctactgcccaagcagacaagacaatggtaatactttccaaaatggaaaagacattcattcgtccatacaacagatatttactgggcaccaaactatatgccagatgctgtaaggtgccagggatccagacacagttcctacccccaggtaatatgtaatgttcacaaggctcttgaggtaaggtctgcaaagaggaggacagtctgccacttgggcctcctgcccggtgccctttttgggtgtggaaaacagaattggccctgtgcctgtgctgggaacagagtggtgaatggtgaccagggttggggagaagagacaggacccagctgaggtcagggactctagtggggtttgtgtcccatgagggtccccccaccgtctccctgtgtctcttaccctgcccagtgttcctgtccttctttgggattgccagcattggtctcagctgcctggtggccctcttcctgtaccacgtggtctttggtatccagtacttgggcatcctgaatggggtggccgccttcgtgatcgtgggcattggtgagtcgcctctgttgtcatggcagtgcgcctcccacatgggaagtctgccccatcccctttctccctggatacaaagcctggcttccctgggggctctacacagcgcctgctgaggcctagagccttggagtgcagggttagaatgtgggtggtgggaggatccttggcatagggtgagtggagagagcacgaaggtttgctggatggaggtgaggatggtgggaaaggcccaggaagtgtgggaaggaggtcaggatgtgggggaaggcgcctagctctgggtgaggttggggccaaggagtgtggtgggtggggcttgaactcttggtgggaggagccaatcagaggggtctctccaaactgtaagctcagaagcaggactcctgcagcctgacctcccaggaggccactcacacttggtctagggccaggttgggcctaatcctggagacagcagaataatcctgagcctggctggggactccctcccacaggtgtggacgatgtctttgtgttcatcaacacctaccgccaggccacccacctggaagacccacagctgcgcatgatccacaccgtccaaactgcaggcaaggccaccttcttcacctccctgaccacagccgccgcctacgcagctaacgtcttctcccaggtgcggacctgtcctccattcctgtcctggcctcccacacgctcatgcatacctagccgctggtctctgcccttcccaccaccgcttgagtggccatatagccttcacctcaaggtacttgccctggctctagagttcatttttgtcacgaatcacccattacccaaacttaacaagtgggaatattataataatccagacagcatgcattagggatcctcagtagtagtaatccagcctccaccctggaggacatttggcagtttccaaagctctttctcgtttaatcttcattaccacggtaattgacaaaggtacaattaccatcctattttccaaaaaagaaacttggcccctgagaggtaaagtgacttcctcaggatcacacagcagataagtgagaagcctgaccaagtccatagtgattccccttctgcctgcttctggctgcattttcctcccttgtgctgacttcctcttgctgcctctgagtggggcttaggagaaggcattgagcccaggctgggtccttggtacagaaagacagtgaattggcccaagtctttgagaaactttacgacctgggctgagtagcccctctggaaaccagtagatgctttaggattatccaggtccttctagagaatcacttctagaaggtaggcagagctgggttcagcttctgcagtgtgaccttgggcaggctgtgtgacctctctgagcctcgctttcctcatgtgtggattatccagggactgagatgcgaggatgattgtgaaagtgtttcacagagtgtaggctgctctgttggtggctacagcttccttccaactagcacctccctgtgtggtccctgtcatacttctggaacatacccattgctcctagtccccagggtccctgcctccgtcatgtggcagcattctctccctccccctcactagcacatggcctggtctagcgggatgtgtcttcctctgtcccccattcattcgcgtaatgacagctactgaccactgcctctgtgccaggcactgttctgggcagtggactgcagatagacaagagcctccacttgaggtggggacccttcctgtgctgctgtgtcctctgacaccagcccttggctcctggtgtcctgtgaggctagtgcctggcattctggcagcctgggcctcctcctactgcctcagtctgggccagatctggggtcctgagtgtctctggctgcagggggcacccaggccccctgactgcaggtccaacctgtcccacatccctctcttcctttccatcaccagatcccagccgtccacgactttggcctgttcatgtctctcatcgtgtcctgttgctggctggccgtgcttgtcaccatgcctgcagctctgggcctctggagcctctacctggcaccactggagagctcctgccagaccaggtaagtcgggcagggcctccacccacagcagggtatccacaacaggcctctatgagccactcagtgcagcaacctctcttccaaaagccttctgtatgaccagtcctttgctaggcagggaacagggaaggagaagatgcttccatccaataactgcaatttgggatcaccagtgtcaccaggaagtgagcaaagcacttgtgtccaagatcttatgacatcaccattcacttcccaaagaaccctgggagctgggttctcttgctgtgcccattttacagatagaaaacaatgactcagggaggttgggcagctttttcaaggtcacctatttagtaggcagtagagcctggatttaaacccaagaactctgcttccagatcccatgctcttagccaccatgttaagtgtcctcaggttctcatctttagatgtagtgagacgtgtgcagagttgaacgggtcagttcagagttgctgctggaggtttagggggaaagaccttgtgggcctggtggttgggaagatggaggtggatggtggtggagttgaatcaggcctgggtggctgcctggggttgggaggatggagggtctctgggcttggaacagggcccactcattgtgataaaggccttggtcagtcgtgttcagggacccatgacaatgtccgctcgcccatggtgagccccagaggggctggagggagagaagggcccagcaaggagcttagacttgggcctgagatggactcctcagctctccccactcacatcttcacccttcaggaccccgctgtggtggtgcaggttggcactgcacacaggtgccccggcggaggcactgctctgtgtaccatgggtgctcagatttgactgttttccgtgacagtttcatgatatagaagcagcgtcatggggaaagggcgccttttctgatctctacagagatgcaaaataagccccacgtctgccccccggcctggggctgtctccccagtggtcctattgggcacagtcgtcttcccagtcagtcagatgtgggcttcaagcccagcctcctccctcggcagccatgaaaccctggacaggtgacttcacctctgcatctcagtttccttttctgtgaaatggttgtgatgtcagcagcactgtgatacctgggttcatctgtgtgtgagtcccatgaggattaagtgagataatccacgcagggctcccagctcactgctggcacgtggcagtggtattagccacacacacagcgctcgtatcagccgtgaggattattctggtgcccagtccctaggttgagctgcgtctctcatgtgttcactccagctgagacctcggccacgcagctacaccctcagcccagccctgttccctcctcctggctcccctgagtattaagttggaggcagagcccctgggccacacagcagcagaggaatgagtcccctgatttgatcaccttagtgcccgggccactgtgtgttgtcatcccctcttcctgggtaatgtttgctgtcaccatttgtctctctggaggaagactggcacctgagggccctggggtagatggtactagaaagaaaccaggtgaccagctcccagaagtctggggtgctcatcctgtgtgtgacgtcagcagcactgtgatacctgggttcatctgatcctcagggccctgccccaccctccctgggtacccaggaccctctggttcacccctgtcccctactctctccacagctgccaccagaattgcagccggaagacctccctgcacttccccggagacgtgtttgccgctcccgagcaggttggaggcagccctgcccagggccccataccctacctggatgatgacatccccttgctggaggtcgaggaagagccaggtgagagctggcacaggcctgccctactgaccccagtgagacccagcgctgcctctgccaggggagtaacacttgacaagttggtcctgaggctgggggccggacaagatggcctgtgggcttcctcaccaggcatctgggcttccctggaagcgagcgtggaccacagtgggctttgattcaggctctgacgggccactgctctgccctggcagtgtcactggagctgggagacgtgtccctggtgtctgtgtcccccgagggtctgcagccagcctccaacacgggcagccgcggccatctcatcgtgcagctgcaggagctgctgcaccactgggtcctgtggtcagccgtcaagagccgctgggtgattgtgggtaagtgggccctccggccctgccccctgtctcacagctccacccccaaaacacacaggaactgggagcccaccccctctcgcagatgccccagggtcagaggcctgggctggggtctctccctctctgaccccccctctttcctgtgcagaatgaagccggtcatggcggctgttactcattggcccctgctgtgtgccagccactcacactgggcagtagcacagagcatgccacacatgggccctggagttagacccacttgagtctgagtcccagtttggccgcgtcctagctgtgtgaatttggctattccagtccgtttagcactcagttcctattctgtaattgaggatgagaacggtggctaggaaggcagctgtcagtggagagtatgtataaagacctcagcccagcgcgtggcgtgcggtaagtgctcagtgaatgtcaagtgctattatcattgtcatcttcgacactatttcagagttgtgtgagatcaagtagtgcaccagctcgtcataaactatgaggtgctctgaggtggtggccgcctcttgtccaggagtattagattatagcttatagtcaaaccccatgggacaccacaaagcaactgatccctggccctgtaggaccatccccagcaagctttgcccacgggctggcatgcagggccttcccccgcacccttaggacacccgccccccaacaaccagagcagttgtctcccggcactttggagccccactgggaacagaccagctgggcccagccccgcctggtgtagcgccctttcctcacagggctgttcgtctccatcctcatcttgtccctggtgttcgccagccggctccgccccgccagccgggccccgctactcttccggcctgataccaacatccaggtgctgctggacctcaagtacaacctgagcgccgagggcatctcctgcatcacctgttcaggtgaggcttctagccaggctgtccctggcccgctcaggtgtccgggtcccaaagactgttggtctgagagatgcaggatccagggtccccatcaatgccagacctcaggcaaatcccactcccctctgagcccccatgttcccacagttcattcaacagatgcctgctgggtgcctgctgggtgctggctctggggaggtactgtgggcgggaggcataggcttcccaagctcagggagttcacattccagctctagggcccggtcactgtaatagtagatctgagctttggcggaggaagaatagggtgtcttagaggcccacgtcatggaaggcttcctggaggaagtaacgtctaggccacaactcacaagaattgggaggagttagccaggctgggaggggagaggaggaaagaagaggggtcaaccaggtggggaggggaaaggagggaaggggtggggttaaccaggctgggaggagaaaggagggaagaggaggggttagccaggtgaggaggggagaggagagaaggggtggggttagccaggctgggaggggagaggagggaaggggttagccaggctgggaggggagaggagggaaaaggaggagttagccaggtgaggaggggagaggagggaaagggtggggttagccaggctgggaggggagaggagagaagaggagaggttaaccaggcggggaggggagaggagggaagaggaggagttagccagttgaggaggggagagagggaaggggtggggttagccaggctgggaggggagaggagggaaggggttagccaggctgggaggggagaggagagaagaggagaggttaaccaggctgggaggggagaggaggcaggagtctaggcagaggagagcaccagaggtgggaaagaccaatgccacatttgagagaggcagctgcaggaactaagtctggcccagtggactgggatagggcagatgggctgaagtgaggggtctggattttattctgattgtcactggaagctagtcacgtggtttaagtggagaagcggggtgagggagtctcccaggtgctgtgtggaggtggactagggcactggggtggaagctagctgggaggctgagagctggtggtgctgggaccagcatgctgatggcagcgatggtggagtcaagaggtttttaggaggtggtttccataggacttggtgacggagtgggagtcgggaatgagccaggagggaagacagagatggctccttgattttgaggtagctggcccaggccgcattttacagagggggagcaggcgaagtcaacccaaggtcatctgactttgccagggcagttagaaaccaaatgagaagacgcctgggtgagtgcttccagctcacaggagcagatctgctggtgctgtcattacctttatttaattagggcggtgctgagatcaacctggccttccccttggtaatggcagccaaatgcgtgataatccactgcagctccgagaggcaccagaagagcccctcacacttcggagccagccctggccacgtccccagctcctctaccccactgccaggatgtggcattgctccccatcatcaccgccgccacaggcctcctgcccttttttgtgacaaaccccgaagctccctgacaacatctggggccaggacccagccagagcccagccaggacccagccagagcccagccaggacccagccaggacccagccaggacccagccagagcccagccaggacccagccagagcccagccagggcccagccaggacccagccagggcccagccagagcccagccagagcccagccaggacccagccagggcccagccagggcccagccagggcccagccaggacccagccaggacccagccagagcccagccaggacccagccagagcccagccaggacccagccagagcccagccagagcccagccagagcccagccaggacccagccagagcccagccaggacccagcaaggacccagccaggacccagccagagcccagccaggacccagccagagcccagccaggacccagccaggacccagccggagcccagccagagcccagcccctactccctgtgcctcttcctctgggaactgcctcttggagggaccccttcagagtacagcagagtgcttcggctttacaaagggcaggcgaggccagaacccagcggggctgcaagtccctccctgggcaggtcctttcacctctgctttccactccatcaagtggggttcatgggaacagcctcaggatggctgtgaggattaaaactttgaaggtgtagttctctcatttctaatttaaaaaacccaaaggaagggctaacacacaacgcttgaggcaaaacaggaatatatgtctcccaccatgtctgccagctgatgaccttgggtcactctaacagtcactcctgttaattggatgcagaggatgtgatgtcccacccccgagggaagtgtggcatcatctccacccgacagaggcggcagagtggcacagagagggtgagcacgggggcagagtggcacagagagggcaagcgggggcagagtggcacagagacagcaagcagggggcagagtggcacagagagggcgagcagggggcagagtggcacagagagggcgagcagggggcagagtggcacagagatggcaagcagggggcagagtggcacagagacggcgagcagggggcagagtggcacagagacagcaagcagggggcagagtggcacagagagggcgagcagggagcgtttcagtgtttttctctgggcaggctgatggtgcctttctctgggcctaaaattcctataaatttggtatttgattttttaaaagttctttctagtttctttctgacccctgacacccaccccctccagtccctgggccccagttcctgagactgtctcagatcccagcctcttccctctgcccatcgggcccaggccaggatgtcctgctgtcctgctgtccttgacatggcgctggggggcaggtctgttccaggagaagccccacagcctgcagaacaacatccggacgtccctggagaagaagaggcgaggctcaggggtcccctgggctagccggcctgaggccaccctgcagggtgagcactgggggtggagggtggggaaatcctccctggtgctagggttgaaggccctgtaaggagagcagataaaattccttctggattctccttcaagaaggagattgtgtgttcctggtcactgcagaggagctggggatggggggtgaatttggggccctcacctcccatcccgccaggacagtaggctcccgcgacaccctggtctgtggtgcccccagagcctccctgtgcaccaaagccaccctgagtgtccaggggcagaggtgggcatcctgggccctgaacactggcttgtccctgctggagtctccctcagaggtgggtgctgggtcaagtgtactgggggaatgaatgccccatcaggcagctgtgtctgtccctgtcaccctatggcactgttgccacctctctcctactactgtcactcccagcaccagccctgtaccaacactagcacattttcagcaggatgccctccatcactgtcacctccgctatctagtccaccccatcccagtgactaccacctcccccaccatccctaccacccc

SEQ ID NO: 1692 - protein, 788 aa, Homo sapiens
MLLAFISSSCIAALVYILTSCSVFLSFFGIASIGLSCLVALFLYHVVFGIQYLGILNGVAAFVIVGIGVDDVFVFINTYRQATHLEDPQLRMIHTVQTAGKATFFTSLTTAAAYAANVFSQIPAVHDFGLFMSLIVSCCWLAVLVTMPAALGLWSLYLAPLESSCQTSCHQNCSRKTSLHFPGDVFAAPEQVGGSPAQGPIPYLDDDIPLLEVEEEPVGPEAGGRTRWPVGFLTRHLGFPGSERGPQWALIQALTGHCSALAVSLELGDVSLVSVSPEGLQPASNTGSRGHLIVQLQELLHHWVLWSAVKSRWVIVGLFVSILILSLVFASRLRPASRAPLLFRPDTNIQVLLDLKYNLSAEGISCITCSAKCVIIHCSSERHQKSPSHFGASPGHVPSSSTPLPGCGIAPHHHRRHRPPALFCDKPRSSLTTSGARTQPEPSQDPARAQPGPSQDPARTQPEPSQDPARAQPGPSQDPARAQPEPSQSPARTQPGPSQGPARAQPGPSQDPARAQPGPSQSPARTQPEPSQSPARAQPGPSQSPARTQQGPSQDPARAQPGPSQSPARTQPGPSRSPARAQPLLPVPLPLGTASWRDPFRVQQSASALQRAGEARTQRGCKSLPGQVLSPLLSTPSNPSLFPLPIGPRPGCPAVLLSLTWRWGAGLFQEKPHSLQNNIRTSLEKKRRGSGVPWASRPEATLQEGDCVFLVTAEELGMGGEFGALTSHPARTVGSRDTLVCGAPRASLCTKATLSVQGQRWASWALNTGLSLLESPSEVGAGSSVLGE

SEQ ID NO: 1693 - DNA, 1231 bp, Homo sapiens
  source
  (1)..(1231)
  CDS (201)..(1031)
ttgctgagaaacagagcctgtctcacattacacatgaggaaggtaccagataaatacagtacctgtcttcccagctggcctggagtggggatgaacataggacaaggcttatgtatcagaagtgttatcccagactcaaaatcaggaacaagtaatgcacaagaggaatgtgttctgagagcactgctggctgtaaaatgatgagttcctgggatagcagagctagctacagtggtgtaagcagggctcaccatggcaccaacagaaagggaagcggtggtagtggtagtggtgatggtgttagtggtggtgatggtggtggtggcagtggtggtgatggtggtggcggtggcaatggtaggggcagtggcgatggcagggaggtggcagtgatggtgatggtgatggtgatggaggtgatggtgatggccatgttggtggaagtgatggtggtggtagtgatggtggtgatggtgatggtggtggtcatgttggtagtgatggtgttggtgatggaggtaatggtggtggtcatgttggtggaagtggtggtggtggtagtgatggtgatggtgatggaggtggtggtggtggaagtggtgatggtggtggtgatggtgatggtggtggcagtgataatagtgatggtgatggtggtggtgcatgtggctatcgcagcagttgtaatggtgatggtgatggagatgatggtggtggttgtggtggtggaagtggtggtggtggtagtgatggtggtggtggtgataatggtgacggaggtgatggtggtggtggtggtggtggtagaagtggtggtggtggtagtgatggtggtggtggtgataatggtgacggaggtgatggtggcggtggtggtggtagaagtggtggtggtggtagtgatggtggtggtggtgataatggtgacggaggtgatggtggcggtggtggtggtagaagtggtggtggtggtagtgatggtggtggtggtgataatggtgatggaggtgatggtggtggtggtgttgtaagtggtggtggtgttggtagtgatggtgatggtggtggcagtggtgatagcgggagttgtgttggtgatggtggtggtggtggtggtggtaatggtggtggtggtgatggtgatgaaggtggtgatggtggtggcagttattatggtgatattgatggtggtggccatgacgggggtggtggcagtgatggtgatggtgat

SEQ ID NO: 1694 - protein, 276 aa, Homo sapiens
MSSWDSRASYSGVSRAHHGTNRKGSGGSGSGDGVSGGDGGGGSGGDGGGGGNGRGSGDGREVAVMVMVMVMEVMVMAMLVEVMVVVVMVVMVMVVVMLVVMVLVMEVMVVVMLVEVVVVVVMVMVMEVVVVEVVMVVVMVMVVAVIIVMVMVVVHVAIAAVVMVMVMEMMVVVVVVEVVVVVVMVVVVIMVTEVMVVVVVVVEVVVVVVMVVVVIMVTEVMVAVVVVEVVVVVVMVVVVIMVTEVMVAVVVVEVVVVVVMVVVVIMVMEVMVVVVL

SEQ ID NO: 1695 - DNA, 38918 bp, Homo sapiens
  source
  (1)..(38918)
  CDS (201)..(228)
  CDS (8843)..(8927)
  CDS (19620)..(20268)
  CDS (25302)..(25419)
  CDS (26738)..(26852)
  CDS (31546)..(31644)
  CDS (38460)..(38718)
agacttaatggacagaggctactgtagtcctgaactgagacaagactgccttggccagtggagatggagaaaaacagtaaaagatacctgggagtagtagaaacagttaagttccagatcacgcaggcccgtgtgcgcggcaccctggccaaagagggacagctccccaagcgcagggactcagcttcctgtgcactgtcatgacgcactgcctgacccaggggtgcagtaagtccctgctgactggatgtctgaatgcagcacttgcagaactttgtctgcttctgagactttttgcctctcccctcccctccactaccttttcttggtcatatggtcaagaatatgtttcattagttctgtttgctttccatcttacctttgtatttttacttgtgtttgcaagcatataccttttccctgatttttcctggctaagcaaatgtgcctagccgccatgccaatgccacactaccaccggaacacatcccctagcaccttctgcctgtcaacttattcctcaaccagcacacaaagcaagttaattctaaagagttctcgtggcataggtcaagcccgggacttctgacactcttctctgttgctaagtaagatgccaataggaaatcagctgcgtgttagctgccactttatgcactgttgagttctcaaagatggttatgtcacacaacaaagtactggcctaaaacccaggttcctgtcttgacttctccctttttttttttagacacagagtcttcttgctcttgtcaccccaggctccaggctagagtgcagtagcaccaatcttggctcaccgcaacctccgtctcccgggttcaagcgattctccctgcctcagcctctcaagtagctgggattataggcaggcgccaccacgcctggctaattttgcatttttttagtagagatagggtttctccatgttggtcaggctggtcttgaactcccaatctcaggtgatccgcctgcctcggcctcccaaggtgctgggattacaggtgtgagccaccacgcctggctgacctcccactttctataggaaggattcacttcacttccctgagctttaagttccttgtcagtatatgtgaggccatgccagagcgcactgtagtgctatgcacacctaagggactggttagtagataccatttcgtggcagcaaacagaagccgaggataagggggctctcttacaagtgaattcaaaatttgggttaatagtaaatgtcagttttttgtttttttgttttgaggcaaagtcttcgtcacccaggctggagtgcagtggcaccatctgggctcactgcaacctctgcctccagggttctagcgattctcctgcctcagccttccgatcaactgggattacaggcacctgccaccacgcccggctaatttttgtatttttagtacagacggggtttcaccatgttggccaggctggtctcgaactcctaaccttaggtgatccacccacctcagcctcccagagtgctgggattataggcgtgggccactgcgcccagccaattttgtcagttcttatgctgcaacagtcaagtatgtgatgtgtatcctcttgtttttaataaattccaaaaacacactaatggaagtttaatactgtttgttgcttatccatctctaggtctcaagagatgtcttaactatgctgtgaaaagtaagaactctctttaagaggatgtttcttggctgggtgcggtggctcacgcctgtaatcccagcactttggtaggccagggcgggtggatcacctaaggtcaggagttcaagaccagcctgaccaacatggtgaaaccccatctctactaaatacaaaaaaattagctgggcgtggtggctcatgcctgtaatcccagccacttgggaggctgaggcaggagaatcactaaaacccgggaggcggagatttgcagtgagctgagattaagccactgcactccagcctggacaacaacagtgaaactccgtctcaaaaaaaaagaggatgcttcttcactattagggaccctaaaaaataaaataaaaggccatagagtttcatcttccagagcaattcacagttgactagagaaaagccatattcatatatctactggttcaagaatcaacatgtattttaagctagtctctattttggttcttaatttcatcacataattaatagttttaggatatactggagcttttctcttaaaaataagtaaagctcctagcacagttttgtatttcttatatagtttttttttaacttttcatcttgatgtaattatacactcaaaagaagttgcaaaatagatcccctatgcccattacccagattcccccagtgatgacatagaatttatcaaaatcaggaaactgacattggcacaatactcatgtaggattttatctggaagtagttactatcaaaatgaacttaggtgctactttttcaaattaatttagaaattaattttggccttctggcattttgtaaaaagctaataaaactctaaaaatatgttgtcaggctgggcatggtggctcacgcctgtaatcccagcactttgggaggccgaggcgggcggatcacctgaggttgggagcttgagaccagcctggccaatgtggagaaaccccatctctactaaaaatacaaaattagctgggtgtggtggcacgagcctattaatcccagctacttgggaggctgaggcaggagaatcacttagcctgggaggcggaggttgcggtgagctgagatcgcaccattgcactccagcctgggcaacaagagcaaaactctgtctcaaaaaataaaaaaataaaaaaaaatatatatatatatatagagagagagagagagagagagagagagagagagagagagtcatgtaaataatgcattatggccattgtcattgaaaagataaaattaaggcatgttaactttgatctgccatggtttcctgcaaggttaatttgcatttgctctaataaaaacagtcctttacacttttaagaattcatggccgggcacggtggctcacgtctgtaatcccagcactttgggaggctgaggcgggcagatcacgaggtcaggagttcgagaccagcctggccagcatagtgaaacccccatctctactaaaaatacaaaaattagccaggcatggtggcgtgtgcctgtagtcccagctactcgggaggctgaggagggagaactgcttgaacccaggaggtggaggttgcactgagccgagatcacaccactgcactacagcctgggcgacagagccagactctgtctcaaaaaaaaaaaaaaaacacacacacaaaaaaacatgaattgtttttctcttaagggcctcaaatatctacagccttgaggttccatattttcaaattggaagtgcgtgacaagccaggaggcatagtgtgaatttctaacttagtactagagtttcgaggtattcttatccttaggaaaataagttttgttcaaactaaaatacagtcaaggacttgttttctttagactagatcaattgacaaacaacctggcccttttcctctcggcatgtgaatcatacaacttgttaaagaggagtattgggttttattcggagaaaggaggagaggagagtagaattgggtagaaggttcaatttgtctgaacttggttggcctcacccttcactgcttgttaactacatgaaatcatgatttagccatgtctaatgtaatttgattgctgggaggatgcaaattttcatgtttgcttttcacctgaatgtatcaaatttcactatgctttaacctcagccactaagaagctattactagagcgtgtttaaacaagcttacttctgccgtcatgttatctgtccagaattcagagtggcaaaccatacttggtgtgtatgtttttctgcacctgaggaaatcatttacattaaggcagctctgtgatagtcagtgttcctcagcgtccccgccacatggcagcaggtggggttttggtgtggggagggggctcgggaatggaaagaaaggactcctttccaggtactagtttgcacttgtcttagagagagagctgtgggggctgggcatggtggctcatgcctgtaatccctgcactttgggaagccaaggtgggcagattacttgaggttaggagttcgagaccagcctgaccaacatggtgaaatcccgtctactaaaaatacaaaaattagccgagcatggtagtgcatgcctgtaatcccagctactcaggaggctgaggcaggagaatggcttgaacctgggaggcgaagtttgcagtgagcggagatcgcactactgcattctagcctgggcagcagagcaagactccgtctcaaaaaaaaaagaaaaagaaaaagaaggccaggcacggtggcttacgcctgtaatcccagcactttgggaggctgaggcgggtggatcttgagaccagcctggccaagatggtgaaaccccgtctctactaaaaatacaaaaatcagccgggcgcagtggtgggcgcctgtaatcccacctactcggaggctgaggcagttgaactcgtgaggcggagttcgcagtgaaccaagatcgcgccactgcactctagcctgggccacagaacaagactccatctcaaaaaaaaaaaaagaaaaggaaggaagggaggaaggaaaggaaggaaggaagctgtgatctcaggctatcagtttagcgtgcctctctttggcccatcacctctcaccctgggaatcctgaaacctaccaggaaccgcaagcaagtaaacctgtagcaagctccctaaaacagcatccaggaaaacacttatatttgttctttttttccccgctaaaaacgctgtctcactgagggaccagtcctgaggaatgtacatgttatcagttaacttgacattttgctctgttgtagaaaggcaacgccttcattccttggacataactctgggtcctcgtcaaataaacaccctagtcatgcttcatgcctatttcttcattttacagtcatgagggtttagcccagtgccttcccctgagactgcatgacttttgtacactcccctcttgtgtaagtcagagtgaatcgtgtctttctggcccgagccccaaaccttccttgggctgagcctcagagccgcctggggtgcaacatgcaggaagctgtgttttgtgttttgaattcctggctgtcctgatgttcttggatgaaccggtgtccttgtacacagtgtctctacttagtgattgataaaagttcttggctgggcagaagccagttgacagttcctgcagttgggtgagtcacgggagcctccgctcatccgctccgggctgcagaggcaactccaggcacccacagcggctcagacgcgtgataagacttgtctgcacaccacatcatcccagcccaggagcctctaattacacgtctggtgtttgcaggagcccaggtggcctgtgcttccatgggctgagaactgtgaagatagcacgggctgggttctcactgccagcgcagaggccagggtgggggaggcacctcaaagtcctaatgcgtcacctcaataccaatgataatacccgcattctaaagaaaacaacagtccatttaatcatgcgcttcttgttttctaaagcactgctacaattttatcttcccatagacatttcgagcccttgtttgtttgtttgtttttacatctcacctttccattcacccttcttagtacaggcagaaaactacctggcactgtgggagactgagtataggagaaagcaggatgacgatgggcctgaatggtggtgtgttttcctccacacaatgtggctttgtcctccaaggtgtctcacgtgatggaagctggctgatctgacttgcttgcagatgtctgtaacagcattagcagcttccaattgtcaggagctcgctgcttgccaggcacgctgtcgggcacactgaaatgttgtgggatggcgctgggatcagccctagaaccatgagacctactttcacagaaaggacactcattcagagcagggcaaggaagtcactgtcaccgagaccaacactgctcctggcccatgccagtcagtggctgatggacgaagctgcactgtgggacagtgaaatgcgacgtttgttgatcctgtcaggaacatcgtctgtgcgggaggcttctgaggacagcagccagaaatctgttttgtttttgttttcacagttacatatttttttttcttccatgcttagctgatgctgaatcaattcgactgttccttttgtaagagtccacaaaccttaacaataatagacagtcatttgtcatctggcaagatgagattgagaagattctcagtgagaaactgaatttacccaactgaaatgttcacttaaagtttttttcctctaaaacctggactactcatctgtggatgacttctactcatgtaattttttttctcaaattggatacttaaatgattctatgtatttagtaatcgcaaaaagtcagttttatggatacagttttctctgaacagttttggtatagacaaaaagaggtgttaccatccacccggcgtgcattataattctgtccttgcctaatccccacccaaatgcccatttccatctacacgaactcattctttctgaatcataaatgccacaccctcagttgcacataaaactttgccatattatgtatacatcagtgtgtacgaagacaagttgtggcttagaagcagtccatttacagtttctggaactgtttatcatctcacttctccataactgattctaggtctgaaaggtttccttctaaaatttgatagcctgattttgaggatatgttttcaatgccttttctggttacaaatcctgatgttggcaggtctttttcctgtaagcatgaagaccaaccaagacaaggtacactgtgctgttaatcaaagtggcacagaacaactatgtgacaggtcatagccaggagtgtaatgtaacatggatatggagggccacaaagagtcccatagccctcctgctacacatctgaaaatctcctgaaattcagaataaacccattactgaaaaacaaaagtgtttattggcataccagactgtttcaggaattcatgaaagatagaaaacagatgggtcttgtgtgatggagaaataagaccaaagaaaagaccaaaggctaaaagatctacaggaggggccgggtgcagtggctcacgcctgtaatcccagcactttgaaggccgaggcgagtggatcacttgaggccaggagtttgagaccagcctagccaacatggtgaaaccccatctctattaaaaatacaaaaattagccagacatggtggctcacacctgtagttccagctactcgggaggctgaggcaggaaaattgctgaacccaggaggcggaggtttcagtgagccgaaatcttgccactgcactccagcctgggggacagagtgagactccgtctcaaaaaacaaacaaacaaaaaaatctataggagatgacttctgtgaaggtggctgtgagttctgagaaagctctgccctttatggaaatagggaacaggaaggagccctggggcaggagtcagggtgattatctgggggcttttggaggatcagccagctgccttcgcccccttccccacctctctcatgctaaactgtgtcacagtgagtatgtgcacacaggccagagcactggtgacaagaggcacagcaagaccctgggtagcaagaaatctgcactatttctaggtgggctagaaaggccctcctgactgagaggactcagccttcctcacactgccctgtgtttcctctgctgtggttatcagaggcaaactcatgtcatcagaacctggttcaacagacaggagaataggaattttgaaatatgagcccaaaatttaaattgcgaagcatttgaggaaaattaatatcaagaaaagtacaaaactcaataaacatgcaactccccatgcaaacatttcacaaagcaaacatgttaaaacaatccttggagattagacagaacattatattcgtgaaataagaacaggctgttaggctgggcacggtggcccctacctgtaatccctgcattttgggaagccaaggcgggcagatcacaagggcaggagttcgagaccagcctggccaacatagtgaaaccccgtctctactaaaaatacaaaaattagccaggcatggtggcgtgcacctgtagtcccagctactcaggaggctgaggcaggagaatcgcttgaacccggagggtggaggttgtggtgagccgagattgcgccactgtactccagcccaggcaacagagactccatctaaaaataaataaaaaataagaacagggcccactgcagtagctcatgcctgtaatccgagcactttgggagcccgagccgggcagattatgaggtcaagagatgaagaccatcctggccaacatagtgaaactccgtctctactaaaaatacaaaaaaaattagtgggcatggtggcgggcgcctgtagttccagctactcgggaggctgaggcaggaggagaatcgcttgaacccaggaggcagaggttgcagtaagccaagatggtgtcactgcactccagcttggtgacagagcaagactccatctcggaaaaaaaaaaagaacagattttgttttgttttgttttggtttgtttgttttgagacgggagtctcgctctgtcgcccaggctggagtgcagcggcgggatctcagctcactgcaacctctgcctcctgggttcaagcgattctcctcctgcctcagcctcccaggtgcgtgccaccaagcctggcaattttgtgtatttttagtagagacggggtttcaccgtgttagccaggatggtctcaatctcctgaccttgtgatccgcccacctcggcctcccaaagtgctgggattacaggcgtgaatcaccaaacccggccaagaacaggctgtttagtaaaaatgccaagggatagaaagtgtgaagaaaggttaagagacatttggaatctgagaagagtacagagtggtggcatagattaaataattaaaatataacatgaaaatttctccgatctgaagaaaaatacaagtcttcatgtggaaagggccctctgaacgccaaatgatttgcttgaaaataagactacgcctagacacgtttcccaaaatttcggaacaccaaggataagaagaataaagcttccaaagagaaaaacaaaaagcaaaaagtcacctacagaggagtaagaattatacaagccccagcaacacagaatgctaaaagaaaatgcaataatattaatatcatcaaagttctaagaaaaaagttaggtcgcacgcagaaactcacacctataatcccagcactttgggaggccaaggtgggtggatcacctgaggtcaggagttcaagaccagcctggccaacatggtgaaaccccgtctctactaataacacacacaaaaattagctgggcgtggtggtacacacctgcaatcccagctatttgggaggctgaggcagtcgaattgcttgaacccggtaggcggaggttgcagtgagccgagatcgcgccattggactccagcctgggcaacaagagcgaaactccatctcaaaaaacaaaacaaaaaacaaacaaacaaaaacacgttattttgaacccaagtcctgtactctctactcagccaaattactattcaaatgaaaggtcaaaataaaatacctgggggtatacaaaacctcaggaagtttgtcacattcagatttgctctctgaaagaattgctcaaagattgcaacctaataagactaagagaatccaggcgctgggtgcagtggctcacggctgtaatcaaagttctaagaaaaaagttaggtcgcacacagaaactcacacctataatcccagcactttgggaggccaaggcaggtggatcacctgaggtcaggtgttcaagaccagcccggtcaacatgaggaaacctcgtctgtactaaaaataaaaaaattagccaggcgtggtggcacatacctgtaatcccagctacttggaaggctgaggaaggagaatcacttgaaccggggaggcggagattgtagtgagctgagatcacgccactgcactcatgcctgggcgacagagtaagactgtgtctcaaaaaaacaaatccaaaaaataggaaaatgtggtatccagtgggcaattataagcaaagcagccattataacttatagttaagtttaagtaattttaaaattttttttaatttttaatttttgcgggtacatagtaggtgtatatatttatgggatacatgaaatattttgatataggcatgcagtgcataataatcacatcacggagaaggttttttttttgagtcagagaagtttaagtaatttttatgtataactaaaaaattaataataatagagaactaagatctgggattgcaaggagaagttcaaggatgcttaattcaaggagaagaagaatgaggactgaagtgagaacagactaaggtttttatctttttggaggaaaggatagaattgattaattctggtcattgaaaaatttaggggctgggtgtggtgagttgcgcctatatcccaaggtcaaggcaaggaggatggcttgagcccaggagtttgagaccagcctgagcaacgtagtaagaccttgtctctaaaaaaaaaaatacaaaaattagctggacatggtggctcatgcctgtagttccagctacttgggaggccgaagtgggaggatcgcttgagcctggaaggttgaagttgcagtgagccaagatcacactaccgcactccagcctgggcaacagagccagatgctgtctcaaaaaaaaaaaaaaaaaaaaatagaaagaaagaaacttagttgccactgtaacagtactaagagatgtgacctttaagaggtgtttagatcatgagggtgccacccttgtgagtggactattgtcagactgcaggaatgggttctcattatcacaggagtggcttcaacccctcttgctctctctcctacttttcttttcttttcttttcagacagagtctcactctgtcatccaggctggagtgcagtggtgcaatcctgactcattgcaacctccacctcccaggttcaagcaattctcctgcctcagcctcccgagtagctgggattacaggcacctgccaccacgcctcgctaatttttgtatttttagtagagacaaggtttcgccatgttggccaggttggtctcgaactcctgatctcaggagatccacccacctcagcctcccaaagagctgggattacaggtgtgagctccctcacctggcctcttctactttttctttgcttttccaccacgtgatgtcttctgccatatgatgacatagcaagaaggccctcaccagatgctggcaccttgctatttgacttcccagcctccagaatggtgagacaataaatttctgttctttataaattacccagtttcaggtattctgttatagcagcaaaaatgaactaagacaaaaaaaaaaagaaataaaacatctaaaaataaaatttacatataataattaaaattattataccaatggatgcattagccaccagaatgaacacaggtaaaaaaattgtgagagctgggcacagtggctcacgcccgtaatcccagcattttgggaggtcaaggcaggtggataatttgaggtcggaagtttgagaccagcctggccaacatggggaaaacctgtctctactaaaaatacaaaaattagctaggcagtagtggtgcacacctgtaatcccagctacttgggggactgaagcaggagaatctcttgaacctgggaggcggaggttgtggtgagccgagatcataccactgcactccagtctgggtgacagagtgagaccctatcccaaaaaaattaaaaaaaaaaaaaagaattatgaactagacagtggatctgaaaatattacacagaaaacaatattatacagaatacagtacaaaaaagtaaagaaactgaaaatatgaaaaagaggttaagagatatgaaagtgtcttagttcatttagtgttgctataaaagatacctgagaatacctgaggctgggtaacttataaagaaaagaggtttatttggctcacagttctgtagactgtacaagaagcatggtgccagcatctgcttctggtgaggcctcaagctgcttccactcatggcagaaggaggggcagctggccttgtcacatggcaagggagggagcaagagggaatggaggaggtgcgaaactctttttaataatcagctcttggctgggtgtggtggctcatgcctgtaatcccagcactttaggaggccgaggcaggtggatcacctgacatcagaagtttgagaccagcctggccaacatggtgaaaccctgtctctactaaaaatacaaaaattagctgggcatggtggcgtgcacctgtaatcccagctactagggaggctgaggcaggagaatcacttgaatccaggaggcagaggttgcagtgagctgagattgtgtcactgcactccagcctgggaaacaaagcaagactccatctcaaaaaaaaaaaaaaaaaaaaagaaagaaaaaaaaagaaaaaagaattgcgaacaggtagtgaaataaatggttgtacatgaatgctcatagcagtggtattcacaatagccagaagacaaagccaaatgtctatcagtggataaatggataaacaaaatgtggtacatccatacaatattactccattatgttatatgattccatttacatgaaacatccattataggtaaatccatagaggtagaaggtcaaatagggtttgtcagaggctgtgggagagaggactggggagtgaggatgacttctaatgagcaccggatctactctgagggatgaaagtattacggagctggacagcagtgaggactgcacattatgaatgtactaagtgcccctgaacagtctgcttcaacatggttcattctgttagatgaatttcagctccgtttttaaaaacttgacacccaggtggatttaggggaaatttccatgaaacattcaaagaataggtatttcttacccttcagaaatatttatatagaaaagcagaagagggatactcccgatatagttaggatatttgtccccacccaagtctcatattgaattatccccagtgttggaggtggggcctggtgggagacgtttgggtcatggggacggatcctccatggcttggtgcagttttcttggtagtgagttctcccgagatgtggttgttgtcaagtgtgtgtggcatctactccccgacccccatctcttgctcctgctcccaccatgtgagactcctgttatcacttcatcttccaccatgagcaaaagctccctgaggcctccccagaagccgagcacatgccagggccatgcttccagtacagcctgcagaaccgtaagccaaatcaacctctttctttataaattacccaatctcaggtatttctttatagcaatgcaagaatggcctaacatgctccccaactcaagacacgactttaggccagggacggtggctcatgcctgtaatcccagcactttgggaggccaaggcaggcggatcacaaggtcaggagattgagaccatcctggcaaacacagtgaaacactgtctctactaaaaatacagaaaattagccgggcgtggtggcgggcacctgtagtcccagctactccggtaggctgaggcaggagaatggcacgaacctgggaggcggagcttgcagtgagccgagattgcaccactgcactcaagcctggggaacagagtgagactccatctgaaaaaaaaaaaaaaagataggacttcagcgtaactgtgattccaaaactgtacaaagacagtacaagaaaggaaagtttcagttcaactttacccatgagatgtaaaaacccttaaattacatacttatcaaatagaacctggtaatgtataaaaacataatgaccacattgggtttacttcaggcatgcaagactagttcattagaaaatctactgacataaggctgggcgcggtggctcacacctgtaatcccagcactttgggaggccgaggcgggcagatcacaaggtcaggagatggagaccatcctggctaacacggtgaaaccccgtctctactaaaaatacaaaaaaattagccaggcgtggtggcgtgcacctgtagtcccagctgctggggaggctgaggcaggagaatggcatgaacccgggaggcagagcttgcagtgagctgagatcgcgccactgcactccagcctgggcgacagagcgagattctgtctcaaaaaaaaagaaaaagaaaatctactgatataattcaccatggtaatagattaaaggagaaaagccagaagatgtcactgatgatggaaaaccattcaataaatttcaacatctactcatgacaaaaactcttagcaaaccaagaatggaaagcgtactttatttatttatttatttatttatttatttattgtattattattattatttgagacagactctagctctgtcacccaggctggagggcagaagaaaggtcagagagacttgaaggggatccggacaggccaccacagaatatgcgactttgacataaagattattttgagctgaaggcaattgagaatcaacagatccagaaagagttctctgccctccccctttttgcctaaaagcaggtcataaatttgatcacaccagtgtactccagcctgcgtgacagaggaagaccctgtctcttaaaaaagtaaataagtaaataaaagtatctgtatttctatataccagcaacaatcagaaaacaatttaaaaaaggaattaacaatgaaaaagaaaggaaggaaggagggaagggagggagggagggaggaaagaaagaaaaaggagaaagaaggaaagaaggaaggagggagggagggagggaaggaaggagagagagagaaagagaaaggaagaaagagagagagagaaagagaaagaaagagagagagagaaagagaaagaaagaaagagaaagaaggaaaaggaaaaaaagagaaaaagaaaaggaaaggaaagggagagagagaaagaaaaggaaagagagaaaaagaaagaaagggagagagaaagaaagaaaaagaaagaaaagagaaagaaagagaagagagaaagaagaaagaaaaaaagacagacctaataataccaacaataaatccaaaagatgtgtaaacgcttaatggggaaattacaaaactttattgaaaaacattaaagttggcttatgcgtgggtcaaccatagtggctcacgcctgtaatcccagcactttgggtggctgaggcaagtggatcacttgaggccaggaattcaagaccagcctggtcaacatgatgaaaccccatctctattaaaaatacaaaagaattagccaggcatggtggcacatgcctgtaatcccagttacatgggaggctgaggtgggataatcgcttgaactcgggaggtggaggttacagtgagctgagatcgcgccattgcactccagtctgggagacagagtgagactctgtttcaaaaaaaaaaaaaaacaaatcatatcagcagcaacaacaaaaacccgattcaaaactgggcaaagtgcacacttcagtagcacatatactaaaaatggaacaacacagattattagcatggcccctggaaaaaaaaatttaatgggcaaagcacttgaatagacatatctaagatgtacaaatggccaataagcagatgaaaagatgctccacatcattagtcattaggaaaatgcaaaccaaaaccacaatgagaatgaccatatgattcagcaattccacttctgcgtgtataccccaaagaatcgaaagcagggtccggaagagctgtggacaccatgttaacagcagcattattcacaatagctaagaggtggaagtaacccaagaatctataaagggatgaaaggataagcaaaatgtggaacatacatacacttaaattttattcagccttaaaaaggaaggaaattatgggctaggggcagtggctcacgcctgtaatcccagcactttcagaggccaaggcgggcggatcatttgatgtcaggagtttgaggccagcctgaagaacacagcgaaaccccgtctgtacaaaaaatacaaaaatcagcctggtgtggttgcgcgcgcctgtgatcccagctacttgggagctgaggcaggagaatcgcttgaacctgggaggcggaggttgcggtgagccaagatcacaccaccgcactctagcctgggcaacagagcgagactcggtctcaaaaaaaaaaggaaggaaattctaacacatgccacaacatggacgttgaggatgatttgctaagtaaaataagccagtcacagaaagacaaatactatgtgattccacggagaggaggtactgagggtactctcattcacagagagagaaggtggaatggtggttgccaggggctaggggtagggggaaggaaagttagtgtttactggatacagagtctcagttttacaagatgaaaaagagttcgggagatggatggtgctgatgcttgcacaacgggatgaatgtatctaataccaccgaaccgtatacttaaaatggttaggatggtacatttcatgttgtatgtattttactgcaataaaaaaatttaatgggggaaatccattaatagaggaatgcccaggagtttgagaccagcctggacaacatagtgagaccccatctctacaaaaaaatacaaaaaaattagctgggtgtggtggcatgtgcctgcagtgccaggtacctgtagttccagctactgggggtgaaggggcgggcagctgaggtgaaagaatggcttgagcccaggaggtggaggctgcagtgagtcttaatcgcaccattattctccagcctaggtgacagaacaagactcagtctcaaaaaaaaaaaaaaaaaggttaaattacagtgtggttatactataacattctgttcaaccattacataaacaaagtggacttgaacatgagcagatttctaagacatactgtttcaaaaaattcaatttgcaaaacaatatactcaataggatcctatgtattttattttgtttttatttatttatttattttgagatggagttttgctcttgttgcccaggctggagtgcaattgcgtgatctcggctcactgcaacctccgcctcccgggttcaagcgattctcctgtcttagcctcctgagtagctgggcttataggcgccggacgccaggcccagctaatttttgtatttttttttttttagtagagatgcggtttcaccatgttggccaggctggtctcgaactcctgacctcaggtgatccacccacctcggcttcccaaggtgctgggattacaggcatgagccactgtgctcggccttactttatttttaaaaaattgacacaataatgtacaatctctgtgtatgtataaaacataatgtgtgtggatgtgtgtgtagagttacatatttgtaaattcctagaaaacagactgtaagcgagacctcaaagtgggactttggggaaaggaagaggaggtaggggagggagggcgggacagagaactttcaagtcttgctttatgtattcatgtatcatttgagtctttcccaatgaacaggtattggtgtatttgttgtataattacatttttaagtgctttaagacccaggtggcgctgagctagatgcctcatggactaatgacatggtattatccaccatccggagataatttactctttcataagtgtgctgagtggctggcattcctcaataagggatgtagaagcataagcaagtattagaaaagaggatgatctcactcttgcctgtgacctttgtaagttttattcttgcactgatttactgctgaagcccaaatttgaggcctgaccatccttttattaccatcatcctttaacttgcccccggctgtcaagttatctgtaacaaagcttcctcccagtcaccctacctgcctcagctagtcactcagcaatgcaaatagagagaattctgcattttgtaagactgaccacatagcacagtagggccccaggcgccaggcaggcagggcctaagaccgccgcacaacagatacggagggctggagggaggaattttcaggaccaggtgaatacgggactgtcgccaggccacattccatctaggtctaaaaaacaaggaaacagcctggagcagcggctcactcctgtaatcccagcactttgggaggccgaggtgggtggatcacctgaggtcaggagttcaagaccagcctggccaacatagtgaaatcccatctctactaaaaatataaaaattagccgggtgtggtggtgggcgcctgtaatcccagctacttgagaggctgaggcaggagaatcctttgaacccgagaggcggaggttgcagtgagcggagaccgcaccattgcactccagcctgggcgacaagagtgaaactctatctcaaagaaaaaaaggaaacataactttctcttcagtatactttgtgaaatcttattctcttctggaaagaagaaatctgaaccaagcacacttgttatggcttacttacctttgcttgcctttaaagaaaaccactgaagcaaagatgtgaaatctaaagagggcaacatctcgctcctggctgctgtcttccaacacaggctctcagattttaccatcatcaatccaagttttgtgtctggaggttgcacctccattagccacaattttgtcttttcttctttattttttaagacaatgaactttcaagtctcatgttatttttaagccaagtaaaaacctccaggagcaggctgaatttaaaaacaaaatacttgccgggcgcggtagctcacgcctgtaatcccggaactttgggaggctgaggtgggtggatcacgagatcaggaatttgagaccagcctggccaacgtggtgaaaccccatctccaggaaaaatataaaaattatccggacgtggtggtgcatgcctgtaatcccagctactcaggaggctgagggaggagaatcgcttgaaccagggaggtggaggttgtagtgagccgagattgtgccactgcactccagcttgggcgacaagagcaagactctatctcaaaaaaaaaaaaaaaaaaaaaaagaaaagaaaccctgagaatgtgatcacatgcagaattgaaacagcaaagcaaaataaagcagctctgtgaagtagctgaatgtctgaggcccagcaggtatgcagccctgtggggagatcccatctgatcagctggtccgggacttgtttgggaacctgcaagctgcaagaagtgaaaaagatgatgatggtggtgataatgatggtgacggtggtggtggtggtggtgatgctgatggtgatggtggtggtgagggtgatggtgatggtggtggtgatggtgatgatggtagtggtgagggtgatggtgttggtagtggtgatggtggtggtgagggtgatggtgaaggtgatgctggtggtgatggtggtggtggtgaaggtgatggtggtggtgatggtgatggtggtggtgagggtgatgctggtggtgatggtgatggtggtggtgagtgtggtgatggtggtggtgagggtgatggtgagggtgatgctggtggtgatggtggtggtggtggtgaaggtgatggtggtggtgatggtgatggtggtgagggtgatgctggtggtaatgatggtggtgatggtggtggtggtgagtgtggtgatagtggtgagggtgatggtgagggtggtgagggtgatggtgatgacggtggtagtgatggtgatgatggtgatggtgatggtaatgatggtgatagtgatggtggtggtggtgacaacagtggggatgttgatgatgatggagatggtgatagtgattgtggtggtggtgatggtgatggtggtgaatccagcattcacattcttcccagtgctaaagaccttccttagtgctcagtcccataagagcccttggccccagcctggatgccttgggactcaagctagggtctgggaaaagggccagctctggaaaggcctcatgctggaaccgtgaagaatgtgtccagcccagatgtgaaaaggaacagccccttcctctgcactgtgctgacagactccttgtgtgcatggggaagatgctgtagctaataaacagggaagagtctgagagcagcccagatcccccccagcactccttgaatgcccaggtccctgctgctgcttccctctaaaaagggagggtgttttctaaaaaaaacaagctaattctacaggagaactgactgcaggagaacatgatgtcctcctcattccttaggaaaccaacaccctagaatatagagtaagtaaccagactcagatgatacagttggctactaaagtaaaatcatattttacatttgatgttgcagttacagaaatgaatcctatggcataggcccagtaggctcttgacctctagaaagactttcttctctgcaatggatgataccaatgaccactttttctagggttactggtcagacagagttggagatgcagcacataaatgtccacaaactggtagaagttctcgaagatatgacaagtgaaaaagcaggggcagaagaatgcaacccctcttgggattctggatagaagttgatccttttgtataaagagtgaaagaaaatcggctgggcacagtggctcacgcctgtcacaccctcacccccaaatcaggaggagcacagtcaagccacctgccacacatcttaatcacacatctgaattctgactccaggtcacttttcaactgtagatagcacccctcccacttaagttcccaatttttgtttgtcccctccccgaccagaagtttaggaagcaagtttgttcagcctgggaaagaagtggacagataagagagagtggaggttttaaaaatgttatcaacatgccaaaagctagtcattcaagaaggaccagaaaaagcccaaggtttagataaagctggttcctggagcccccatcccaaacactgtcagagaaagggaaatgaatcttcactacaatgcctgggctctgataatactgatttaccttagagatgctcttttagaaatgctcatctagaaacaccttttcctgctgccctgagggcacaaaaactcaaagagccaatttctttcactatctcccttcctgtagatatctctaaaattccaaggagcttattcagaggtaagggatgctggcaaaacacctagcaaacttgagagagtttacagttgttcactattagtaataagtggttttcagatcagcagtttcactttttgttctttttttttgagacagaatctcactctgttgcccaggctggagtgcagtgctgtgatcttggctcactgcaaactctgctgcccgggttcaagcgattctcctgcctcagcctcccaagtagctgggattacaggcgtccgccatcacgcccagctaatttttgtagtttttagtagagacagggtttcaccatcttaatcaggctggtcttgaactcctgaactcgtgatccacccaccttggcctcccaaagtgttgggattacaggcattagccaccgcacccagcctgtgactttcaaatagcaggtatccgccgggcacggtggctcatgcctgtaatcccagcactttggaaggctaaggcagacagatcacctgaggtcaggagttcaagaccagcctggccaatgtggtgaaaccctgtctctactaaatatgcaaaaattagctgggcatggcggcaggcaattgtaatcccagctacttgggaggctgaggcagaattgcttgaacctgaaaggtggaggtcgtggtgagctgagatagggccattcattggacttcagcctgggagacagagagactccgtctcaaacaaacaaaacaaatagcaggtatccagtaaacaaacagcaggtgtccagttttctttccttattaaaagtgggctgggcactgtggctcacgctgcaatcctagcacttgggaggttgaggtaagaggatcacttgagcccaggagtttgagaccagcctgggcaacatactgaaaccctatctctacaaaaaataactagctggacatggtggtgtgtgcctgtagtctcagctacttgggtggctaaggcatgaggatcgcttgagctggggaggaccaggctgcagtgagccatagttgcgccaccacaatccagcctgggcaacagagcgagaccctgtctcaaaaacaaaacaaggccaggcgtggtggctcatgcctgtaatcccaggactgtgggaggccgaggcaggcggatcacttgaggctatgagtttgagaccagcctgggtaacacagtgaaacctcatctctacaaaaaataccaaaaattagctgggcacagtggtgcgtgcatgtagtcccagctactcaggaggctgaggcaggagaattgcttgaacccaggaggcagaagttgcagtgagccgagatcgagatactgcactccagcagactagagtgagatcctgtctctaaagaaaaaaacaacaaaagtgtattttacctcaaattcaccaatctgaactctaaattcatcccagcccctcccccaaggactccttcacaaactcaagacattgaatctccacatgatctgtgttcaagtcagaaatgtgggggttgtggccgggcgcagtggctcacacatgaaatcccagcactttgggaggccgaggcaggtggatcacttgaggccaggagttcgagaccagcctggccaacatggcaaaaccccgtctctaccaaaaataaaaaattagctgggcatggtggcacacatctgtaatcccagctactcgggaggctgaggcaggagaatcgcttgaacttgggaggtggaggttgctgtgagccgggatcatcgtaccactgcactccagcctgggtaacagagcaagactctgtctcaaaaaaaaaaaaaaaaaaaaaaaagtgggggttgtcccggacgcccttcctctcacaccctgagtgggtgcccaatgctgccacctgactggccccagcatcccgcctgcctgcgtgcctgctccagaagggtctcttctctgcagggccagtctttgaacgaggtgggtcaggtctctctctggtggttctgtctctgtcttgacacctcaccatggccctggctacctctccaacttcacctcctaccatgtttctctaacccgcctctcaatgctcctgcggcagggcctctacactccctgctcctgctgcctggtatgctctgaacagacacctacttgtctctttcacacccaaaagtcctcagattcccactaagatctcttttcggagaggccttcacttcccatcatgcaattcccctgtcactgcctccttaccctccttaattttcttcatagaatgtgggtattttcgtatttgctttcatctctccccggcacccacaacataagctccccaaggacaaaggctgtgtttctccctggcgtattcccagcagcaggaacagcacttggcacacagtaggtactgactgagcacacagctggggaaggaatgaaagcctaagcactgctcctacttcacacctgaaatgtcacttcctcagaagcctccctccccactccccaccatggaaatcgtctctcccttagcattatcatctgttaaagcacttactaaaatagacaattacacatgtgtttgcattgtaaaagttaacatctgcccagccttctggactagggtcagccacccacagcgtgagagccgtcccaagcaggtctttcgctggcagtgacgagacggctgccagtgctctgggttgccagcatatcctcttggccactccagcagctatgagaccctcggatggagtctcgtggactgactgagctcacctgggtcacacggccagtggtaaacagggctcggattggctgggtctggatcatgtgcccgcccaggaggaactgggtggttcacaaggaatgctgggtgctattacctggggaagggaaaagagatgttgggccaaccttgaaaagtttttatccaagtactctttccataatggaaaaaggaactggtgtataaaaattcaccagtacagccaactttttttcttttttttttttttggagacagggtctcgctgtgacacccaggctggggtgcggtggtgtgatcacagctcattgtagccttgaccccctggggctcaagtgatcctctcacctcaggctcctaagtagctgggactacaggtgcatgccaccatgcctggctagtttttgtatttttttgtagagatggagacttgctatgttgcccaggctggtcttgaactcctggcctcaagcaatcctcctggctcggtttcctaaagtgctgggattacaggcatgagccaccacacccagccctcattggtattttttaatagcacattaaaaacacacagctaataagcagagaaaatcacaagcctcttaaattctgtttgtatgcctttcctccttgctgtgtaaaatgtggtcactgttcttttatttcagtgccatatggacagttaagagctgcaaatgaaggtgatacggaatttaatttcacaaaagaaatgagagacaaaacaagaaacaatcagtagtttgctaaatgccctgtttattctgcaaacaaggcttagaaatgtatagacacaatttgtaggctgagaaatctctgtgtagttgtgacttccatacttccgcaaaagtagtaaggacagcgacttctgaacacattaacctaccactgttttgtttagagcgaacacagtgagaatggattcctaacggcctgtttctctaagtgatcgtcgcagttcgctgctctagtctttaagaacaagtggagccttcacttgagccgccacctccttgccattcagggcttcaacaattgcaagcgcaaactcgaagctggtcccaggcccccggcttgtaagaatcaggccgtctttttccacacgattctcagagtaggtgtaatgacctgcaaagtagaaacagaaaaggtgacatcctaatgggctatgtgacgagaaagacgattacttaccaattaaattcactattacagcatataaacccaacactgtagctaaccattcaaaaacatttactaggcactccaagctcttagaagccccctacaaaggtatttttaaaactgtgcagagcaaagggtgacagaaaccactgttagaatgaaacaaatatgcgtgagttaaatgcagctgctaagactttaagtgttgggggagatgtcggtgaatgacagttactcacatcactatttacaacaaagctcaagtgtcaattctgaagtgccggggaagggtgaagggatgcggcagcgctgaacgcagaagccaccccaatcaacatgtggcggcacgcacaccctctgatgcctcaaaaacaaccacagcacaacgtaatggaggcgggtatgcatgtgagtgtgcgtgtgcaggtagaaaccacattccctctcaaggactactttccttccgcatccccgcacctccaggcccgccggttggctatttcttggcaaatataataccaaaactgggactcttaagcatggatgccctgagctctgcccctccacagcaggtagtcaccagcctctccactgcacacagagcctaacctccctccccacacccatccctatcactctcccacctggagcttcccttactgtatacaacacgttctctcctgctccaggaagagctcaagggctgctccctccacccagagaccagctctttccagttccttgctccttcagtttcagcatcaacaaaaacccctcagagagggtatctgtgaccacccccacctccccaaattaggtacctctattgactctatcaccgcattctatttactgccctcgcagcattgatacaatctatcacaatctatgaacatttcatttccttgtttattgtttactctttaaaaaggctgggtcttcatcagtccctgtctggccaatgatatccatggcacacaggaggcacccctgaagtgtgaggtcaaaggcaccaaacaccattcttgactcgatctcctttctcgcctgtcccctgctttaaaggggaaggatctctgcatgattacagctctcccttccggctgtgcgccccttcgatccatgcccagcacccaaaagctaactgtccagagtgcaaagcagggcatagccagttccccatggaaagcccttgccaactctctccagcacctgaaggtcacgctgaactccatgtcacggggcctggagccctctgcggtctggccttcgcacagagactgggctgggaccagaaggagatggaaaggaacctgctctctgggtagaagctggtggtgcctgcactaggctggtgacagtgatccagaggaaatggaggtttgcaatgaaggcctaggtgaggaggcttcaaggatgactcccagctgcctgtcccaggtgactggatgatggtgacaccactcagtgatgtggggccacagaacagatttagcggagggggaagtgacaaagctcctctgtgaactcctgctctatcctgatgcaccggccacgcaggcaggcgggtggctctggtcaccaccgctcagtgcggacctgagaacaccctgagggcacagctttctcttcttccttcttctgttcccagtgccaggcactaaggaggagcttaggaaacgtctgttcaatgaacacgcagaaaaattcatctgaaaacctcccttcaaacagaagcagagtgcttctgctatattaatgagcttctgaaaccacacagtgttcatttcttttccaaggagattaacaatggctataggaacttgtcttactgtcattagaaaccaagccactgctggtcgaaggcagtgagttatctcaattgatcgttcacaggcagttacaccttgttctactctttctcctcttctcactactgtgcttgactaatctaaaaaatttaaaaaatcaggtcacccaccaaaataaatgaatagagtacataaacaatttccaatttaactattgtagagaaaaagaggatccctagtttgaggggaaaaggtttatcataatctggcctcatttactgatggttaaaccaggccaagaccatttcaaatgctaacctagaaactggctgggctaggtcttccagagcgacagtgagatgcacagctgagagtgggacaacgcgaggcacaactgtaaatggttcactgaacagtatctttgtggctaaaacatcgcaaacagggcttaaactggttaaatatgcttaaaggttctacggttcttgtcagacttttaaccacgagaagcaaaaggtttaaggttaccaactgcctccacctagtggcgaagacagaacatgcaccccatcagcaccaggaaggcactgtgcgaactggaggctgggattgtgaccctatagcgaattcagattttacacttcccgttcaaccagcagaaggcattgatttttatttctttattttttttaaaccagactccaagtcttaaagtctcttcagagaaaaagcaatgggaagccggatgcagtggctcatgccggtaattccaacactctgggacgccaaggcaggtggatcacctgaggtcaggatttcaagaccagcctgaccaacatggtgaaaccccgcctctactaaaaaaaaaaaaaaaaatacaaaaattagctgggcctggcggccagtacctgtaatcccagctattcaggaggctgagacaggagaatcacttgaacccgggaggcggaggttgcagtgagccgagatgcgtcactgcacttcagcctgggtgagagagcaagactccgtctcaaaaaaaaaaaaaaaaaaaaaaaaaaaaggcgggggggctgggcatagtggctcacgcctgtaatcccagcacatggggaagccgaggagggcagatcacaaggtcaggagatcgagaccatcctggctaacacgatgaaaccccgtctctactaaaaatacaaaaaataagccaggcgtggtggcgggcacctgtagtcccagctacttgggaggctgaggcaggagaatggcgtgaacctgggaggcggagcttgccgtgagcacagatcgtgccactgtactccagcctggatgacagagagagactctgtctcaaaaaaaaaaaaaaaacaaaagacacaggacacaggtcagcaacgacaagcctgagggccgaggccaggttgctgcctgtttttgcaaatgcagcttcactggcacaaagccaccctgcgtgtttagtactgtctgtagctattgtggaggtgcaacagttgagtagctgccagagatctgaagtcccagaaagcctgcaatatttaccacctggcctttggggagcagtcagttgacccctgagcagagttctgggttcaaatcccaggtctgccatttagtggctgtctgacctctcagagcttcactttctggtaaaatgagaatgacaccaacctagcaaacaaacagtactcagcagtggtggcatgcagtggcgttacagaagctaggtgagggaagtcttttcaccaacaatcctgaagcaggtttatcctcaggcaacggatgaggaaacaggctcagagacactaaggaaacttcccacagtgagtggggaagctgagggccaccccacgatgccaggctccagagaccctgctcttcagtgctcgggtatgggaccaggcatgcggatgccatcaaacagtggacaaatgagaaacggaatcacacattacagttataactgacttattctaaaatcggaggaattaaaagattatggggactggagctggtagcacacacctgtaattccagcactttgggagaccaaggtgggagggtcatttgagcccaggagtttaagtactgcttgggcaacatagtgagaccctgaatctatcaaaaaaaagataagaaaaaaagaaaaaagactatggtcttcagatgggattgcttatctgagaagaaactgtcacactgatctttcaagttcacagtgaggacaagggcctcacccagagcagacccccaggtgatgactgcagccctacctctcgaagtgtcctgaaggagtagacatttcaagtatccatttcttataatagaggttactgactaaatccaacacctggtaacttaaatgtgtgggagccttttgctaccacagagcaggggaggggcaggaagccaaaactggatgcaaggcagagggctgggcttgagctctggcctcagtctctccttgtttgtgaagccaggatgatgccacctgccttgctgggcactggggaccaggaagctccaccaagataacgtacgggaacgtgctttgtaaactccaagtgtgagcatcaacaatctgatctttttctatgcctgaccaacctcaatgtttttgaggcactaaaggaaaacagatgcaacaggcacaccttcaggtagtgcaggagcgcgctccgcttgtcttccctctgaagacatcacaaagggagcccagttctgttctttccatttctttcaacgctctaaaatccctccatgagcttaaagtaaattaaattcctacatttaaaatgcccagaaaccagagacttttattaaaaagtaccaatttttttttttttttttgagatggagtctcactctgttgcccaggctggagtgcagtggcacgatctcagctcactgcaagctccacctcttgggttcacgccactctcctgcctcagcctcctgagtagctgggactacaggtgcccgccaccacgcccagctaatttttttagtacatttagtagagacggggtttcaccgtgttagccaggatggtctcgatctcctgacctcgtgatctacctcccccaccggcctccccaagtgctgggattacaggcgtgagtcactgcatccagcaaaaagtaccaattttcaaacagatcgttttaatgataacatagtatctttctagcaactaaaataaaaccatgagcggggcacagtggctcacatctgtaatcctagtactttgggaggccaagccagaaggatcgcttgaggccaggagttcaagaccagactgtgcaatatggttagaccctgtctctacaaaaaaatttaaaaattagccaagtgtggtggctcatacccatagttccagctactcgggaggctgaggtgagaggattgcctgatcccaagaggtggaggttacaatgaactgagatcacaccactgcactcctgcctgggtgacagagcaagcctctgtctcaaatacattaaataaataaacaaaccatggattttcaggaaaacactgctctggatcaaatgtaactgtatgtagaatgtacaacagcaagagagaaccctcatgtaaactgtggactctggatgatgatgtgtcaatgtgggtacagattctggtgcaggatgttgatagtaggggaggctatgcatggccaggggcgggggcctggggagtggcgagtgggtcaaggtagacgggaatttggctgtgaacctaaaactgctctaaaaaactaaagtttagtaattaaaaaacatgcagtataatgaaaagtgcatcacttttaaagtggagctcagatatgctcacagcggcattcaaggatgatcattatggcatggtttacaagggcaaaagcagaaaaccaccttcatgcccacccccaggagaaggttacatacagcatggcacattccaacactggactagcagctgtacttaacaaggatgaagcaaatctaaatctacatgtgctgttaaaagataacataagatattaacattaagttaaaaaaagcaagctgcagaacaatacatttagtagatctcattttagttaaaataaaaaggataatgagtatgtgatagataaaattctacaggtacacaagaaacttttttttttttttttttttgatagggtcttgctttgtcctccaggctggagttcagtggcgagatcacagctcaccatagctttgacctcccaggcttaaagcgatcatcccacctcagcctcctgagcagctgcaactaccagtgtgcatcaccatgcctggctaatgttttttgtatttttagtagagatggagtttaaccatgttgcccaggctggtctcgaactcggggctcaagcgatccacccgcctcagcctcccaaagtactgggattacaggcggaagccactgtgcccagtctacaagaaacttgtggtggcacatgcctgtaatcccagctactcgggaggctgagacaggagagtcccttgaacccgggaggcggaggttgcagtgagctgagatcacaccactgcattccagcctgggcaacagagcgagagactccatctcaaaaaaaaaaaaaaaaccacacacaggcatatgggccaggcgcggtggctaacacctgtaatcccagcactctgggaggctgaggcaggcagatcacaaggtcaagagttcgagactgggcgcggtggctcatgcctgtaatcccagcactttcagaggctgaggcgggtggatcacaaggtcagaagttcaagaccagcatgaccaacatggagaaaccccatctctactaaaaaatacaaaaattagccaggcgtggtggagcacacctgtgatcccagctactcaggaggctgaggcagaagaatcacttgaacccgggaggcggaagttgcagtgagcagagaacgcaccatggcactccagcctgggcaacagagcgagactctgtctcaaaaaaaaaaaaaaaaaaaaaaaaaaaaagagtttgagaccagcctgaccaacatggtgaaactccatctctactaaaaatacaaaaattagctgggtgtgatggcatgcgcctgtaatcccagctactcaggaggctgagagagaagaatcgcttgaacccgggaggcagggattgcagtaagccaagatcacgccactgcactccagcctgggcgatggagcgagactccatctcaaaaaacaaacaaacaaacaaaaacaagcatatacttacctccattcatcattttgtctttagcaagagggtgtgttgtaactttacttccaaaacctatttcatgagccaacagagcagtaggacctaagaataaaaataaaaagatctaagtgcagatatagaaaagcccatgtttaaaaaatcgcaatagtgcctggcacagtggctcatgcctgtaatcccagcaattggggaggcctaggtagaaaaattgcttgagcccaggaattcaacatcagcctgggcaacacagaccccttctctaacaacaacaaaaactgcaacagcaaagtattcttcaaaatcaagaggctcttaccaaacatacagctacgattctgaaatgaaacacttcctagtatgagagataaagtatgtttataacaaacgatttgctgagcacatctggcaaaagcacagaaactcaaaatacttcaataaccatttactcaagaagatttaccttgataccagcagagcatacacagataaacaaaatgtgctcacctctctcaccttccccatccccagaacagggaccacatataccaggagtccaaaggagggggaggatcactggggcgggctcaacttcttacctcactcttagtaaaaggaaagatttagttacatgctaaaggcaactggtactctctgaacttctggattttattgctcttttgtaatcttattttctacttgaaaatgggaaattaggccgggcacggtggctcatgcctgtattcccagcactttgggaggccaaggcggctggatcatgaggtcaggagatcaagaccatcctggctaacacgctggaaccctgtctctactaaaaatacaaaaaattagctgtgcgtggtggcgggcgcctgtagtcccagctactcgggaggctgaggcaggagaatggggtgaacccgggaggcagagctttcagtgagccaagatcgtgccactgcactccagcctgggcgacagagcgagactctgtctcaaaataaataaaaaataaataaataaaatgggaaattaacactcgttcatccacctatccacccaagtatgccaggtggtaggattaaaatggacagcacactgtccttgaaggagatagcctgtgaagtgcctggaagtgtgagatataaaggcactagcatcacgtgatgaaagctacttaagcaaagaaccacatggaagtgtcagttgatgaagtctttccaaattggcaggtcctaacttgagatttttatttaaatgtattcactgaaaacggccaacttcagggagggtcacaagcatattgcgtatgtaatggtcctaaataaggattaaaaacaaagattttatatacctttcattgttatttcatcttaaagctttttacaaagtattcattctacctttttcctctaagccacacatataaacattctttctaaggcctcacatgacacttagaaggatacgtttcagaacagcaccttgatcttggaaacacttaaggtgccctggatggctaagatcctgtggcacagtttgtacacttttagtgtcagcaaacctgagaggtcttggtcttactgtcctttcatttttcaacaagactccaaggaaggaattatataatatacccacaagctactcagaccgtagctgttacaaacaggaagatcacacaaatactacctaattacataagctttctgcctaatatcagctgtcagtttcagaccaagtcctgatttatagctcttaaatcaaaagcctcaaatgtctcttctccacgttatttttacacacaagacagctatgtatggtagcaaattttagaagtccgtaagaattgaataattatcaatttttatttgaatggatttataaattgtttttaatttttatttggtaagaatttaagaagaaattcctacatcatcttgcattttaaagtaaactttaatagatgatagcacagtgaggaaagtgatcggtgaacgagaatttttaggctgctcccttcaaggtggtaataaaatcactgctacgatgtgaataaatttatgttacagttggattcaggaatttactgatgtctttcatacttatcaggtaagctcataatcactgctttctggggcgtcagaaccctatttggaatactggagaagagacgtttcactctcccaggacctgggattctgatggatgaaaacgctctgtactctgcactacagtgcagagggcgcagctgaccatgtccccttctgcagccaacagcaccaccctgtggtaacatgcaaaatgaccacctctgccaactccccagctcctccaggtggccaagaccttgcttccagaggcctcattcctagacctgggcatctcagctgacaactgtccactcctccaactccacacttcctccccctcccctactcaaagtaaatatcatttaattttcttctcaacatagactcccttccaatttgcgttcctcattcactcaatattaaggactaggctaatattctttgtgttcaaaatgtttccaatccctaactgcaacacttcagaataatcttggctgggtgcggtggctcacgcctgtaatcctagcactttgggaggccaaggtgggcggatcacgagatcaggagttcgagaccagcctggctaacatggtgaaaccccgtctctaccaaaaatacaaaaattagctgggcatggtggcaggtgcctgtaattctagctactcgggagcctgaggcaggagaatcgcttgaacctgggaggtggaggttgcagtgagccgaaattgcaccactgcactccagcttgggcaacaagagcaaagctcccatttcaacaaaaaaaaaaaaaaaaaagaatcttatttttctgtttgccaatttaaaagatccaaatctcttccatcactcctctgttccattcccataaccctcatctcaattagctcagctcatcatcacattttttcctatttctggtgtagtgcccacaacagtggtgcaggatattcaatggtataaacacactgctagtgtgttttctatttttactgttttttatataatttttttttttttgagatggagtctcactctgtcgcccaggctggagagcagtggcgcaatctcggctcactgcaagctctgccccccaggttcacaccattctcctgcctcagcctcccgagtagctgggactacaggcacccgccaccacgcctggctaattttttgtatttttaggagagacagggtttcaccgtgttagccaggatggtctcgatctcctgaccttgtgatccgcacgcctcggcctcccaaagtgctgggattacaggtgtgagccaccgcccttggcctatttttactttttttttttaagagaccaagtcttgctctgtcctttaggctcaagtgcagtggtgtgatcaccacatctcaatgtaacctcaaattcctgggctcaaagtgatcctcccacctcagcctcctgagtagctgggactacaagtgtgcaccaccacaccaggctgattttttaaaatatttttttgtagaggtcggtgggggggtctcactatgttgcccaggctggtcttgaactcctgggttcaagtgatcctcccacctcagtctcccaaagtgctaggattacagctatgagccaccacagccagcctgtttattttttaatgttgatttaaagtactataaggcccatgcttcttagcatggcattccatctagcctcagcacaaaacagtaagccaaatgtggttgattttttttttttttttttgaaacgaagtcttgctctgtcgctcaggctggagtgcagtggcacgatctcggctcactgcaatctccgcctcccgggttcaagcgattctcctgcctcagcctcccaagtagctaggacgacaggcatgcgccaccatgccctgctaatttttgttatttttatttttattattttattttatttattttttgagacggagtttcactcttgttgcccaggctggagtgcaatggcgcaatcttggctcactgcaacctccacttcccaggttcaagcgattctcctgcctcagcctcccaagcagctgggattacaggcacgcgccaccacgcctggctaatttctgtatttttagtagagatggggtttcaccatggtggccaggctggtttcgaactcctgaccttaagtgattttgctacttttgtggcacaggacaaactgacatgtggtttttactttcagcagaatcataaggaaacaaactcagcccaaactctttcttcctttggtcaaagaatctaggactgaggcttgcttcacagcagcagagccaaagaaaaccaaactcaaggatctgtgactttctctccaaagaggggagcagctgcttgggctgcagtgactgcagtgccctttggcagagataattacctgagcctcagggcaggtcaaaaggctagtggtgactcttgtagtaagcccacgtacaagacctgccagggtggtcaacctctgtggttcttcccagcccctaatgccacggttctcaaacatttaggtcttagaatccctttagcttttatgtgggttatatctatgaacatctgccatattaaaaattattacttttttttgagacagtcttgctgtgtcacccaggctggagtgcagtggcgtaatcgcggctcactgcaacctccgccgcccgggttcaatagattctcctgcctcagcctcctgatagctgggattacaggaatgcatcaccatacccagctaactgcccagctaacttttgtatttttagtagagacggggtttcaccatgttagccaggctggtttcgaactcctgacctcaagtgatcctcccacctcagcctcccgagtagctgggattacaggcgtgcaccaccatgcccagctaacttttgtatttttagtagaaacgggatttcaccacgtttgccaggctggttttgaactcctgacctcaaacgatctgcccacctcagcttcccaaagtgctgagattacaggcatgcgccactgtgccacgccaattacttttaatggcaaaaaccacaattacttttacatcaacctaataaaactgggaaatttttaaaacacaataataaattctcagatgatggtatcatcctactctgatgtcactcctgaaagactgagaagaaaaaaggcgaataacattttgtttgaaagacatggtgtcactctgctgcccaggctggagtgcaatcatagctcactgcagcctctaactcttgccttcaagcgatcctcccatctcagcctcctgagtagctgggactacatgcatgcagtactgtgcttggctaattttttgtttgtttgtttgttgagatgggggtctggctatgttgccaaggttagtctcaaactcctggctttcaagagatccttctgccttggcctcccaaaatgctgagattacaggcatgagccaccacacctggcccctcagtagcatctgctttgaccttgcaagtgcaccaaaagaacattgagaaccactgatactcgaatgtatcaagtccccaggacctctggcccataacttcttttgaaaagcctactgtattgaacaaaatagcaacagcaacatgttttgatgttgatgtttaccaaaccatccactcattcattcgtttattcattcactcttctgacaaatatttattttattttattttattttttttttgagacgaagtctcgctcgtgtcccccaggctggagtgcaacggcacaatctcggctcactgcaacctccgcctcccgggttcaagcgattctcctgcctcagcctcccgagtagctgggattacaggcgcccgccaccacgcctggctaatttctgtatttttagtagagatggggtttcaccatggtggccaggctggtcttgaactcctgacctcaggtgatctgcccgcctcagcctcccaaagtgctgggattacaggcgtgagccactgcgcccggccctgacaaatatttaatgaagacctatacaacaaggaaggtgctggcaaaaattacagcatgggaaaaaaccaaaatggcagaacatcatctgataggaaagcaacaagaatggatcttaaaatggttatgagaaaataaaatattactaaggtacaaagagaagaggacatctgcgaagcaccaaatgtccttgttctaaatta

SEQ ID NO: 1696 - protein, 450 aa, Homo sapiens
MTHCLTQGCSWSAAAGSQLTATSASWVQAILLLPQPPSWSGTCLGTCKLQEVKKMMMVVIMMVTVVVVVVMLMVMVVVRVMVMVVVMVMMVVVRVMVLVVVMVVVRVMVKVMLVVMVVVVKVMVVVMVMVVVRVMLVVMVMVVVSVVMVVVRVMVRVMLVVMVVVVVKVMVVVMVMVVRVMLVVMMVVMVVVVSVVIVVRVMVRVVRVMVMTVVVMVMMVMVMVMMVIVMVVVVTTVGMLMMMEMVIVIVVVVMFAALVFKNKWSLHLSRHLLAIQGFNNCKRKLEAGPRPPASPEGHAELHVTGPGALCGLAFAQRLGWDQKEMERNLLSGLEFSGEITAHHSFDLPGLKRSSHLSLLSSCNYQLECNGTISAHCNLRLPGSSDSPASASRVAGITGARHHAWLISVFLVEMGFHHGGQAGLELLTSGDLPASASQSAGITGVSHCARP

SEQ ID NO: 1697 - DNA, 37904 bp, Homo sapiens
  source
  (1)..(37904)
  CDS (201)..(258)
  CDS (10133)..(10331)
  CDS (22722)..(23754)
  CDS (25833)..(26006)
  CDS (28729)..(28809)
  CDS (30042)..(30239)
  CDS (31406)..(31526)
  CDS (31577)..(32016)
  CDS (32051)..(32196)
  CDS (32354)..(32567)
  CDS (37552)..(37704)
  modified_base (4684)..(4783): a, t, c, g, unknown or other
  modified_base (15881)..(15980): a, t, c, g, unknown or other
  modified_base (23553)..(23652): a, t, c, g, unknown or other
  modified_base (37717)..(37816): a, t, c, g, unknown or other
tccaataaatatttactagttgaacaaatcaggtaagaatggagaggactcacaacagctgatggagcccagcctccccaggcccttccttcagggattctaaatgtccatgtccctaacttcagggttggaccctttctccttactcacccctgtcaacctttccctggcctgatgcacagatgtgggttctgttagaaatgatctccatttcagatgaggaaacgggctcagctgtgttgagtgacctactgttaggtttggtgcaaaagagattgcgttttttgccattgaaagtaatggcaagccgggtgtgggggctcacgcctgtaatcccagcactttgggaggccaaggcgggtggatcacctgaggtcagttgttcgagactagcctggccaacgtggtgaaaccccgtctctactaaaaatataaaaattagctgggcgtggtggtgggtgcctgtaatcccagctgctcaggaggctgaggcaggagaattgcctgaacccaggagacggaggttgcagtgagccaacatggtgccactgcactccagcctgggcgacagagtgagactccattaaaaaaaaaaaaaaaaagaatggcaaaaaccacaattacttttgcaccaaacctaatagctttgtggcccgtgggtatggctggcttctgaggttgcagttcttgtacctgctggcttgggaaaaggagggcgctgagccctaagagatgcattactaagacataatgcatttctgcaaagcatcattctaccctgaatttggtgggcgtgaactaaggaggaggctctatttcagagtagaatgctggatgatgtgttggatgatgctggatcagccattgtgagtcctcttcattcttatcttttttttttttttttaataagacagggtcatgctctgttgctcaggctggagtgcagtggcccaacaatagctcactgcagcctcgacctcctgggctcaagggatcctcccacctcagcatcctgagtagctaggactacagacatgcaccaccacacctggctaactttttttttctttctttttagagacagggtctcactttgtcacccagactggaggggagtgatgcgatcacagctcactgcaaccttgacctcccaggttcaagtggtcttcccacctcagcctccggagtagctgggactacaggcatacaccactatgtctggctactttttttattttttgtagagacaggggtcttactatgttgcccaggctggtctcaaactcctgggctgaagcaatgctgcatcagcttcctaaaacattgggattacaggcatgagccatcatgcctggctatacgtattcttttaggataaaaaagagttccaggagactccctttttgcaggagactccctggaggtggaatctgctgttgggattctcagctgggagaggggtggaggctgcactctgctgggctgctggttgtttttttgttttgttttgttttgtttgagatggagttttgctcttgttacccaggctggagtgcagtggcgcaatctcggctcactgcaacctccgtctcccgggttcaagtgattctcttgcctcagcctcccaagtagctgggactacaggtgcccaccaccaagcccagctaacttttgtgtttttagtagagaccaggtttcaccgtgttggtcaggctggtcacgatctcctgacctcgggtgatccacctgcctcggcctcccaaagtgctggaattacaggtgagagccaccactccagccctgggctgcatttcttggcccagtcttggcccagtgggatggtcttcctgttaaagccacggagggcatcttccctgtgaagggagagcttgatggctcccaggatgtcagttaccccattggatccactcccaccccctgggaggtgagaagggtaggagttatattgcccagtttacagatgagaaaactgaagccctggaacatcaagtgtgatttgcccaaggcctcagtatcacaactcgcagagtccgacagcatgttatagacccacaccagagtgtggcacggaacaggaagagccagagttcctgaaagtcaggaggtttgtgtaacgcctctgctgtagacaagggctgaccgctctcaaagtccggggcagcttcaagggagcattttgagggaggcctgtggcctaacaaactgtgcacttacatcagaggtttccagggccccctccccccactatgtgggggccacatagaccttgggttaattgcaggatcctgtgagctttggtgtctctgtgtctgggatccccacccccaggggtgctgtgaaggcaggtaggcttccctgcttgatagggtagcaaaggcctgtgggtaggacttctgcattttctcttattagcaaggaagaaaggcttctggaaagaatgaaagaaatcttcacgaaaggaagccgggaatgagaaagctgcagcagaggcggatctccaacagaacacaagtttccataagcggggggtggaagaaagaattggactcagaggagaccaaagaatggcatttgttgggtgcttcttctgtaccaggcattatgctttgcatcctttagtgtcacagtgactctgaggttttattcttttcctttttatagatgaggaaacgggcttagggagatttaaacacttgccagaggtcacacggctagtaaatgatggagtggggatttgaacagaacacatctcagccatcatcggtggcatgagcggatccattgggagagtttccagttccagtagtgcagggagtcaggccacagcggtgatgctttgggggcccagcggccatctgtggaccaggagagctagtggggaaacctggggtggtggcagacaggctctagagcctgcagatctgtgttcctgcctctaccgcttcctgactgtgtaacctgggatctgttacttcacctccctgggcctcagtatccatgtatgtaaaatgacacttctccaagggttgagaggagtacatgatatggacatcaagcagcgtgtacagggcgggctcagtgcaagtccccagagggtgggcagcgtcagtttcagtccttgccctcttccttgggcttgtgtaatttgataattgaagtttgtctgtgtcaccatagacttggcacagctcgtggccagggcaggggctgttcctctttgcacccagggtcagtgcccatgaatgcttcatgggcaaagaagaacaagagtggggcaggggggtcaggcagctgctgggctgcttggggatgagtggggtgaaataccacctggcctcaaagtgacctgcacattaggacaactgtgatcctttctccttcagtacatgagtcctctgtatgagcaacacaggcccagagtctgcactacagggaacaatcatcgtagctaacacttctatggctatgaaccaggcagtgttctgaacatttgacacatattccctacttaagcttcacaacattcgcttgaaatgggtactgttatcatcatccccattttacagttggctaataaatgacagagccgggatttgaaattaaagaacagagaggttaagtgacttactgaaggtcacacagctaataagtattaaaggtaggattcaaacccagatagtttggctcctaggccatacttttaacctctgtggtgtacagcttcttggggaacaagcagcaagaatctgatcttggtatgaaaccaaggatttaacaattatcctaataatggcacatgtgggcacagcactacacagtttaaaaagcacatacagccaggtgggattacaggatcacacttttaatcccagcactttgggaggctgaggcgtgcggatcacttgaggttgggaattcaagaccagcctggccaacacggcgaaaccccatctctacaaaaaaatacataacctagctgagcgtagtggtgcatgcctatagtcccagctactcaggaggctgaggtaggaggatctcttgaggctcagaggttggggctgcagtgagccatgatcatgccactgcactccagcctgagcaacagagtgaaaccctgtgtcagaaaaattaaaataggccaggtgcagtggctcacacctataatccctgcactttggaaggctgagatgggcaaattgctggagctcaagagtttgagaccaacctgagcaacatggtgaaaccccatctccaccaaaaatacaaaaaattagccaggtgtagcggtgtgcacctgtggtcctagctcctcaggaggctgagacaggaggatcacttgagcccaggaggcagaggttgcagtgagccaagatcacgccactgcattccagcttgggcaaaacagtgagaccctgtctcaaaaaactaaatacataaaataaataaaaatttaaaaaataaaataaaaataaaaaccacatactactatataacttgctttcatggttgtgatttactcagttctctaacttctctatgaagaagatagggctttattggcttcttttttaaaatgtttatttctcatttaaaccagagagtttatttatttttattttatttatttatttatttttgagatggagttttgcttttgttgccnnnnnnnnnnnnnnnnnnnnnnnnnnnnnnnnnnnnnnnnnnnnnnnnnnnnnnnnnnnnnnnnnnnnnnnnnnnnnnnnnnnnnnnnnnnnnnnnnnnnttagcgggcagatcacgaggtcagcagtttgagaccagtctggccaacatagtgaaaccccatctctactaaaaatacaaaaattatctgggcatggtggggcgtgcccgtagttgtggctactcaggaggctaaagcaggagaacggcttgaacccagaaggcagaagttgtggtaagccgagattgtgacactgcactccagcctaggcaacagagccagactccgtctcaaaaaacaaacaaacaaacaaacaaaaaattagctgggtgtggtggcaggcacctgtaatcccagctactcgggaggctggggcaggagaattgtgtgaacccgggagacagaggttgcagtgagccgagatcgagccattgtattccagcccgggcgagactccatctcaaacaaaaaaaaaattgcttgtccaatccgtgataatttattgaacagttacatgcaaagtcattcattcacattacctcattgaatcctcccacaaatccaggaagtagatattattgttcccattttacagttgaggaaaccgaggcattaggaggtggctttcccagatcctacaacttgtgagagctgagactcacttccaggcctgcccgagtgcagagcctgagctgataattaccgggctctccagcagcctcagtcccatcctgggtagatgttacctcctgcttgttttcattctggccttccccccatcacttccatccctctagccactcctgaaattccgaacactgccttaattattctctctacctaagtgcccgcttcattaaggtgctttctgccatgagtttttggcttaattatgtggtgttcttcattgtacttagttggggaatctgattaatcaccattttatttatccaaatgttcatttatctgcagccggcgtctcctgggagagccttgtttttgctgagcttgcccttcctggattgtcttccccttcacccctgtcttaagtgctcctctttggagggcaccttctttccaggccttggctgcccactccagagcttgccggggtcccggcatctgggagatgggactggggatgcctcagtagtttagacgtgggaacatgggcagaagtagagtaggaattgacaagaagatgggagtcctgggagagtgggacctcaggcatggaggattctgggccctgtctcagcttgccaagaaaggcctcagcatctcctcctggtctcccacttccagtccatcctcctcctgtagccagacagcactgcacccaaagcacccagcttccatgtctctatgctcagaccttccctgcctcctagggaccagcagaataaagccctgggtccaaggtccagccacatctcttccccaccctgccacccctcatttcattcatccagagccaccccaggcctccaagctgtccataccctctccatatcatgtgaccagcttgtcccagtttgcccaggacttttggaacttgtccctgaaagtgctgtgctctaagaaaccccatggtctcaggcacactgggacagttggtcatcctcagctcagggtcacccacagtctcaggcagactcatgggggtgtgctcatttgtcgccatcagttttgtctttgaatgtgtttgttcacttataaaaatattactcataggccgagcgcagtggctcacgcctgtaatcccagcattttggaaggccgaggcgggctaatcacttgaggtcaggagttcaagactagcctggccaacatagtgaaaccccatctctactaaaaatacagaaattggccaggcgtggtggtgggtgcctgtaatcccagctactcagcaggctgaggcaagattattgcttgaacctgggaagcagaggttgcagtgagccaagatggtgccactgcactccagcctgggtgacagcccaagactccgtctcaaaaaaaaaaaaaattactcctggatgtaaaaaccttgcagaaatatatctggctgaatctcaaaggcccccataatcccattccctagagttaacaaattaacagtttgatgattctttgttttgttgttatgcgtgaaaacagcgttgtcctactcaagtggctctgcagcgccgtttcaaacgtggtagcttggccctcttcccacactccatcataatggctgcattgtgttgaatcgtgtggaggcactgtcattgactgtgaccccttctgagggacatccacagtgttttcattattttttatttattttattttattttttatttttttgagatggaatctcgctctgtcacctaggccagagtgcagtggcgcaatctcggcttactgcaacctctgcctcccgggtgcaagtgattctcctgcctcagcctcccgagtagctgggattacagccaccatgcctgtctaatttttgtattttttgtagagatgggtttcaccatgttggccaggctggtctcgaactcctgacctcaggagtccgcccaccttggcttcccaaagtgctgggattacccgcgtgagccactgcccctggccttttttttttttttttaagacggaatctcgctctgtcaccaggctagagtgcagtggtgtgatctcagctcactgcaacctccacctcctgggttcaaatgattctcttgcctcagcctcccgagtagctgggactacaggcgcacaccaccacgcccagctaatttttatatttttagtagagacaggatttcaccatgttggccaggatggtctcaatctcttgacctcgtgatccgcccaccttggcctcccaaagtgctgggattacaggggtgagccactgtgcacagcctgatttttttttttttttttttatacagagtctcctctgtcgcccaggctggagtgcggtggcacaatctcagctcactgcaagctccacctcctgggttcacaccattctcctgcctcagcctcctgagtagctgggactacaggtgcccaccaccacacccggctagttttttgtgtttttagtagagatggggtttcaccgtgttagccaggatggtctcgatctcctgacctcgtgatccgcccacctcggcctcccaaagtgctgggaatacagagatgaatgaaccaccctgcctggtccccggcctgatttttttttagacttccccttggtagcaccctgggccgtttggcccaggatttatgcaaattaatgtagatatatgctaattagatcactgccaggcactttgttctaatggagttgccagctcagaggtgcagtgggttggatctgcccagaaggggcttgcagagccccccagctggggaaggggtggggatgggtcagtggtcactgagatgaggggatggggttaccatggagacagaggccaggagcctgctgctgcctcctgacaagaccagggctggcccaatcagtcgcatcctgggcctccctagcagctccaagctggtctctgagggctaatgatgcagaaggtgagcagatgctccctggctccccaggcccagcggaggtagagggctgggccgcagcaggagggcgtgcagacaggcagatggcagtcaggggattgggggtccaggacctgtcccgaggaggaggaagattacccctccagggtggaaggcacctccagcagtgccataaggggtgagactcccaaatgctggggcatgcaaacaggctgggcggccaaatctcaaagagcaccttggtaagaagtggtggaaaagagcaagggtttggccccagactggttggagtcagccgttctgcgtccccttaggcaagcctgccactgctctgggcctcagtttcctcatttataaaaaggggtaggattggccgggcgcggtggctcacgcctgtaatccctgcactttgggaggcccaggagggaggatcacgaggtcaggagatcgagaccttcctggctaacacggtgaaaccctgtctctattaaaaatacaaaaaaaaattagccgggcatggtggcgggcacctgtagtcccagctacttgggaggctgaggcaggaggatggcgtgaacccggaaagcagagcttgcagtgagctgagatagtgccactgcactccagcctcggcgacagagagagactccgtctcaaaaaaaaaaaaaaaatagggtaggattaaaaggtgtgacatgagcatgaggtttatagacaatgagtgctccataaagtatcctaaggtagaccccttgagagaggttactgatcttctgggagatttggtttgttttgtttcctaatgggacagatgttactggtgtctgctctgaggagggaaagggcaagactgtcatccccaagaggacaggagctgggtgcactgtattcaccactgtgttctcgggatttagcacacaagaggcactcgaactcctgacctcgtgatccacccgccttcgcctcccaaattgctgggagcgtgagcctgaccaagatggcaaaaccctgtctctactaaaaatacaaaaattagccaggcatggtggcagtcacctgtaatcccagctactcaggaggctgaggcagagaattgcttgaaccagggaggcggaggttgcagtgagctgagatcgcaccactgcgctccagcctgggcgacagagcgagactgtcaaaaaaaaaaaggcactcgagaaatgtttataagacgaatacatgttatgtactcagaatactgtctagatcaaataggagataaataaatgtggccgggcacagtggctcacacctgtaatcccaacaccttgagaggccaaggcaggggaggatcacttgagctcaggagttcgagaccagcctgggaaatatagtgagacccttgtctctacaaaaaagtttaaaaaatagccaagtgtgggtggcagctgcctgtagtcccaactactcaggaggctgaggtgggaagatcacttgatcccaggaggctgaggctgcagtgagcccggatcatgccactgcactccagcatgaacaacagcaagaccctgtctcaaaaaaaaaaaaaaaaaaagagagaggagacttctggtccaactttgttgtaagacattccggaactatagaagtgcatatagttaagattcaaagtctccccatctccccactccctagaaataacatctcataactgtttattgttatgagataactccctggcttttggtcctgtgtttacagtcgcacgcgtttggtgccttttaggggaggtgtttacacgaacggaatcatgttgctctgcagcttgcttttttcacctaacagtgatggccgtggccatttcccagtgggatccgggctgggatagagaggcagcaaggctgcaaaagccctggaagaaagacaggagagaggggtgtgcgtgcgtgcgtgtgtgtgaatgcgtgtgcgcgcatgtgttcgtgcgtgcgcgtgcgtgtgtgcacgtgtgcatgtgtgtgtgtgtgcgtgtgtgtgtgcatgtgtgtgcgtgtgtgtgtgttcggggaccagggaggcatcttcacaggtccctaggcacagtggaggggaacctggcagagaagcccccatcatcagctcatcagctcccagaggacagtggtctctgtctccagacgagctctctgaggcaggatacacgccatgttgttcactgccatatgtccagggcccggcacattgtaggtgctcaagaaatatttgctcaatgaattgagtccttactgggcccatcttctttggcagggtcaaagaccacttggtctctgtgactgttccttttaatcttatgttgagttaaatctcatttcaactcatgctcagatggcaatgaccccagatggacccccggagatggggagagggaggagcacctcccctcaggcacatcactgccccctctgctgtcagtttgctcacctccctaatgagggggttgggccagcagatctcaggggtccttccagctctgttgtctgcggctttcatcccactccctcatttcacagatgaggggttgagtcgagtttaattttgtcagctgcctcagaaatccattgggaaaaggggggtctgaggttggggatgcaacaaaagctgttgccatatagtcagcaccaactgcgtgccagacatccggctggctgcgagctttatgggcactgtctgaatcctcaggacatttcactaatgagaaaactgaggctcagagagggggataacttgccgaaggtcacacagtgagtcgatgagaactggggctggaactcaggcctccctgtccttaaatggagagctcgtccctcagtggactgaagtcagtgagagagacagaaccaggctggaccaaagctttctccagaaacttcaagggtccatccctcatctttccccagacaggctgacttctgtgtctaaggcctatggtgacatggctggaattttggccaggaaagtagttgacttgccaaattggctggcaagggtggggcacgagagacttctgatgggttcaatggccctgagcctgggccctacgctaccttctctcccagccagcttcctggagctagggtgggcccatctgcattattcagcccttgtccctcactccccaccttgtgtgggctcctggggttggcgtctagacagacaagagcatcctactgagaacagaggcagccctgactcggggctgaaggttcctatggcaacggcatcccccttcagctggcagctacctgataaataaataattaggggtgggggcggggagcgaagggcagggggaagggcagcagggagcctcagggaggccccactctggagagcagaagggccagttaggtttgaagtagggtggagggcaggggggttggcattgctaggtgaaagaaagtggacggaaaaaagtggccagatatgagagatttggaagatcccagagagccagggcttgaggatgggctgcggcgagtgggggacgtggaacaagtggggagcatgagggagactgaaacctaaagtttaggttcctagctcaagcggctggacacatcgtggggcccaaaacactggacatggaccaggtttgggcatatggagttcacaatgagctgttcactgagtcattggttagaatgcagctgggggctgcacgtgagcaggtagtcactgaagcttgggtgggcatgcgtttcctgggataagtgtggcatgaagagggcctgggatgtagctttggggcactctaatagttaggggcctgctgctctagaatggggtagtagccaaggaaggtggagaatttggttttagcacctggagtgtgccaagcactggtctcaccactgaaaatacggcagtgaaccacacaagcagaaattcctgccctcacaaagcttgccatccactgcaggagacagaccataactaaatagtgtgtaaaagagtgtgtttgccaatgataagcacaggccagcgtggtggcacatgcctgtagtcctagctactcaggaggctgaggtgggaggattgagccaaggagttcaaggctgcagtgagccgcgatcacaccactgcactccagctgggtgacaaagcgaaaatcccatctcaaaaaaataaaaataaaaagtaaaaaaccaccaggtgcagtggctcatgcctgtaatcccaacactttgggaggccacggtgggcagatcacttgaggtcaggagtttgagaccagcctggccaacatggtgaaaccccatctctactaaaaatataaaaattagctgggcttggtggcaggtgcctgtaatcccagctactccagaggctgaggcaggagaatcgcttgaacccgggagatagaggttgcagcaagccgagatcgcgccactgcactccaacctgggcgacgaagctggactccatctcagggaaaaaaaaaaaaaaaggccgggcacggtggctcatgcctgtaatcccagcactttgggaggccaaggcgggcaaatcacaaggtcaggagtttgagaccaacctgaccaacatggtgaaaccccatctctactaaaaatacaaaaaattaggccagacgtggtagctcacgcctgtaatcccagcacttttggaggctgaggcgggcggatcacgaggtcagaagatcgagaccatcctggctaacacgatgaaaccccgtctctactaaaaatacaaaaaattagccgggcgtgctggtgggtgcctgtagtcccagctacttgggaggctgaggcaggagaatggtgtgaacctggaagacagagcttgcagtgagccgagatcacgccactgcactccagcctgggagacagagtgagactccgtctcaaaaaaataaaaaaataaaaaaataaataataaaataaaattgagattgtttataagacactgaatctgatttttttttttttaatagagatgggatctcactatgttgccaaggctagtcccaaactcctggcctcaagccatcctctggccttggcctcccaaagtgttgggattacaggcatgagtgactatacccaggctacatctaaattttttaaaagatatatttaggccaggcatggtggctcacgcctgtaatcccagcactttgggaggccaaggtgggtggaccacatgagcccaggagggtatgagactaggctgggcaacagggcgagaccctgttctctacaaaaaatacaaaaatccactgggcatggtgggatgcgcctgtagtcccagctactcgggaggctgaggcaggagaatggcgtgaaccccggaagtggagcttgcaatgagctgatatcacgccactgcactccagcctgggcgacagagcgagactccatctcaaaaaaaaaaaaattcatttaaatctgcactcaccatcggaggaagagacggccttttccaggcctgggtcatagccctgaataccccggtttgtactgatttccttcccctcctctactaagtgggtcctgagttcccaaagggcagggaccccaacttcttcacttctgcatcccggagctagcacaaagcctgacatagactaaacgttctgtgaataaataagtgatgaaccctggctgggtgagggcatgtcagatgtgggatggatggataaatgggtctagctggttatagataaatgagtgaatgattgttgggtgtgaggatgaaggaaggccagagccatgctgagaatgggaagaacagcccccactccatgtcaagtggagagagcagcacctgtgggccagtcagggaggccttcctaccaaaagagggaactgagctacactgtgaaaactaaggaggacttggataaagccaaagggaggcccagcgcagtggcttatgtctgtaatcccagcattttgggaggccaaggcaggaagattaattgaggccaggagttcaagactactcagggcaacatagtgagacccaatctctacaaaatattttaaaattacccagatgtgatggcacatgcctgtagtcccagctactaaggaggtgaggcaggaggatgccttgagcccaggaatttgaggttacagtgagctgtgatcaccacattgcaccccaacctgggcaaaagtgcaagactctttctcaaaataaaatataaaataaaaaataaggcaaaggcaaatgaaggtaggactttaactgctgttacagcctcttgggggcaggagctgatgggaaatacaggattgagccagatcctagtgggccctcggtgccaaactaagaagcttagactgttaagccttctattaattagccactatgtatcaagtctaattgtctgttagtttatgtgatatctctatatccccacaacaacttctcaagagagggattatcttctctatttatagttgaagaaatagattcagagagggaaagtgacttgccctaagtcacacagcagagctggaatttgaatctgagtttaaatgactacaaatctgctactgctttaaaaaaaaaaaaaaaaaaaaacctctctctgttttctatcaataaggtcacagagaacagagggggtttgagtgggtaccactttggctggagatgatatcacctcttaggtggattttttttttttttttgagacagagtcttgctctgtcacctaggctggagtacagtggcgcgatcttggctcactgcagcctctgcctcccaggctcaagcaattctcctccctcagcctcccaatctgctgggaatacaggcatgtgccaccacacccagctaactttcgtattttcagtagagatggagtttcaccatgttggccaggctggtcttgagctcctgacctcaagtggtccgccgaccttggcctcccaaagtgctgggattacaggcgtgagccactgcgcccagccttaggtggaaatatttggcagggtgcctcctcagctgcaccatgagcctggattgctctgtcacagcctcctccgtcctctgatggagaccttctcccttagggccaggtaacagctgagtcaagaacatcaagctggaccccagaacaccaaggctcccaaggccaggcagagtcagggtggaaggaggaagagtggagtggaggaagtgtgggataggagcagcagacagagaccgtggcagaggcccctggacaagcctggggagtttctcccccaaggccagcagctgatggaagtcaaggctggaagggcccttggagattacctagtccagtgacttccatgcatggaagaggagccccaaacccagcggggaaagtgggctgcccaaagtcacccaggagtcagaggcagacttcccaccacaatttacacctcttgactcccttaccagtgccaagatgggaaaaggtggtgccaagatgggacaggtggctgagaaaggcctattctgccaccaacctgctgtgtgaccttggacaagtcacttcccctctctgagctcatgttctcttcctcaaaagaaaaannnnnnnnnnnnnnnnnnnnnnnnnnnnnnnnnnnnnnnnnnnnnnnnnnnnnnnnnnnnnnnnnnnnnnnnnnnnnnnnnnnnnnnnnnnnnnnnnnnntctgaaatttttcattactgcctaatcccgagcaaagttaattatttcttccactattctgtttatgtacctcatagacgctattgccaatctatgtattgcttataactctctttatatgttttgcctctccaacaggcctaagagtcacaaacttagatgccagtagaggccagagaggaaaaacaactggtgaagctgctgagtttaagacagtgatcagtggacaatgccacactgttggccactgtattaacctcaggtctttatcccagggctttcttgggcacacctgtgccattcatgtttgcttccaaagctcctaacacaatacctggcagagtaaccaaaccgaagtgacccagaagtgttgagatccaactctgcccctaaggtgctatgtaactgtaaagaactcagtcagcgtctctgcccttcaggttctccctttctttctctctcccctcttcaaaaaaaggcaccttgaagatcatctaggccaatgggttttctactttgttcgttagaggccttggactgaggagctgattttggaggccttcacagaaggcaagggcacattgagagagcaggttgctagtcctctttccctatacaatcagacaagttctacttttttctgttttagaaatgtatgctttcttttgaagaaaagggtctactgttagaaaagtttgaaaacataacaaatggtacaggcaaagttgttctgcctgggatcaaatcctattctatgacttccttgttatatgaccctgggcaagtgatctaacctcagtttccttatctagaaaatggagatgatgataatagcacctacctcaaaggattgtagtgaggtttaatgagtaaatacatagaaattgtgcctggcacatcgtttttgtttttttgggtttttttttaggcagggtcttgctctgtcagccaggctggagtataatggcacaatcatgactcactgcagcctcaaatccctgggctcaagtgatcctcacgccttagcctcccaagtagctgtaagtacaggcttgcaccaccacacctgactagttttttaacaatatttttgtagagacagggtctcgctacattgcccaggctgatctcgaactcctcagctcaagcaatcctcccacctcagcctcccaaagtgctgagattacaggcatgagccaccacacccagcctggcacatagttcttgataagtgttggctacagtggtataatacaaaaacatatttggtctttgtccctggatcttgggaatttcctgagcaataggagtgttttttcttattcataagccccttctatcacacttgagtttaccctaatgaggtgacttaagtagagcccctagatctagggatgggactagtcaccagaaagaccaagtgatgagaaggttggaaatttcagtcccacccactgacctctgagaatggggggtggtgctgaagattgagctatatgaaaactcttgaacaatgagattcagagagctgggttggtgaatgcatccacaggccaggagggtgatgctccctgactcttcagggacagaaactcctgcacttgggactcttctggacctcaccctgtatacttcttcatctggctcctcattagtatcctttaaaataaacagacaaacgtaagtaaaatgccttcctggatcctgtgagccattctagcaaactattagaactgaggaggggatagcaggaacccccaatttatagccagtttatcagcagtatagctgggtggccagagacttgtgactggtctgaagtaggggcagtcttgaagaactgagtccttaacctgtggggtctacactaacccctaatagctagggtcagaattgaactggattgctggccacccagttggtgtgaagaatttggctgatgtcagaaaatatcccagaggctgtaattagtgagcatgttcagtcctctaacttgaaagcagggaaattattatgtttaacaactcagctatcttataagtgaactttctcagaagcctttagtgttttaacccacagagagactaatggtggaagactgaaacactgacaagccttggttcagggcaggggagaaagttcttaaccctctagaaatctcatcacctcagcagaacccaccatgcttctctccgggctgaccatgcctctgtcttctcgctcaggaagtgtggatatattctgaatcatctctctcctttatttccaaaccctgcttcattctccccacagcatttctttggcccaagggttagtcatccttcaaggtgaatattgatgtcatccccagctcctagcccctccaacttcttgccaaagatgtttctatctgttcctacagttaggctgtcttcctccgtagaaccctgacttccaggtggtaaagagggcacaagatatgctgggcactgaagcaggaacgacaggagtgctgggtgtgcaatcattcatttgctacacatttgctgattcctgccctgatcctagccctgtaggatgtagagataatttatgacgtagttgcttaagagtggaagtatgagagggcatcctgtgtgcgtgaattcgtcagggcagcacttgcgggaatgagccaggggcagaggttaattctactgaggtcagacaggccatccccactcccacaggacagacttatgagtgagtcagccaggccttggaatagaggttacaggcatgaccagatatagtcaagagccggcaggggtggtcagagccccagtgggaatccactgttactataggaattaaatgagataatgcatgtagaagcttggctcagagtaaacactcaataaatggtagctattattgtctttttgttattgagttgcattgttagcctcacagaggtaactggcagagattatatctggaagaggcccagcagaggatctggtagagaacgttacatctgggctgagcctttgtggaggtggttctattcttttgtgggaaatggactctttggagaacctgacgaaagctgtgcctctccccagaaaaaggcacagctgctcacatgatgctttgcatattatttcagggacttcacagactcctggaagcctgtctagtcacggaacctggttggacacagctgttatttgccaagcatggctgagaaaatttcctgctgttctgccaggcactgtggctcacacctataatcccagcacttttggaggccgaggcaggtggatcgcttgagcccaggagtttgagaccagcctgggcaacatggcaaaactctgtctctacacaaaacacaaaaattagccaggcatggtggtacacgcctgtagtcccagctactcgtgaggctgaggtgggaagatcaaatgagcctcggaggtcaaggctgcactgaattgtgatctctccattgcactccagcctgggcgacagagcgagaccctgtctcaaaaaaagaaaaagaaaagaaaagttcccactattagcttattgacccaagtgaaaacttcagcacacataggatattcaacggtggggatattctgtgtcttttaaaatacaaagtggtatcctgcagaatgggtggaagagggagacctgtgaagagacccatcttttttttttttttttgaggcggagttttgctcttgtcacccaggctggaatgcagtggcacgatcttggctcagtgcaacctccgcctcccgtgttcaagtgatttctcctgcctcagcctcctgagtagctgggactacaggcgcctgccaccacatcaagctaattttttgtatttttagtagagacagggtttcatcatgttggccagcctggtctcaaactccgatctcaggtgatacacccgactcagcctcccaaagtgcagggattacaggtgtgagccaccacgcccggccaaagagacccaccttaaagtccagggagaagacacaattggcttcatgggcatgtgacctctgcagtcacacaggaccctgcatgttttgttttctgttctttgtttttttgagacaccgtttcactctgtcacccaggctggagtgcagtggcacaatctcagctcactgcaacctccatctcctgggttcaagcaattctcatgcctcaacctcccaagtagctgggattgcaggcacatgccaccacgcccagctaatttttgtatttttttaatttttattttttgagatggagtctcactctgtcactaggctggagtacagtggcgtgaccttggatcactgcaatctccgtctcctgggttcaagcgattcccctgccccaacctccctagtagctgggattacaggcatgcaccaccacgcctggataattttttgtattttagtagagatggggtttcaccatgttggacaggatggtctcgatctcctgattatctgcccgccttggcctcccaaagtgctgggattacaggtataagccaccacgcctggcctaattattgtatttttagtagagatggggttttgccatgttggctaggttgatcttgaactcctgaccttaagtgatccgcctgccttggcctcccagagtcctgggattatagcgtaagccacagcgcccggccccctgcatgttcttgacttcacgctctgctgtgttgccatcttgaaattcttaattttttttttttttttagatggagttttgctcttgttgccccaggctggagtgcagtggggtgatctcagctcaccacaacctctgcctcctgggttcaagcaattctcccacttcagcctcctgagtagctgcgaattacaggcatgtgccaccacacctatctaattattttttgtatttttagtagagacagggtttttccatgttggtcaggctggtctcgaacgcctgaccttgtcatctggccaggcctcccaagtgctgggattataggcatgagccactgcgtctggccgaaattcttaattttttaacaagaagtgctgcatcttcattttgtgctgggccccccaaactatgtagccagtcctggaagaaaacagtgacacatttatttgcatgcttactatgtgagcagcaaacaagtgacagtgctggaaccgggacccaggccgtttgggtccaaaaccacgggtcctaacctacatcttaccatacttcctgtctctcgaatcaagagggctagtgagagtggagaggaagggaaagaataagaaccttctgtttcttccaccagaacactcttcactcccctgcctctccttccttcctattgtcgtctcagtatcagtttcgtttcctcaaagaggtgtttcctggtccccaaacctaaattatgcccctctcattctctcttttctcccttagtattttatttattatttatttattttgacagagtttcgcttttgtcgcctaggctaaagtgcaatagcatggtcttggctcactgcaacctccacctcccgggttcaagcgattctcctgcctcaacctcctgagtagctgggattacaggtgcctgataccatccctgcctaatttttgtatttttagtagagatggggtttcaccacgttggccaggctggtctcgaactcctgaactcaggtgatccactcacttttgggaggccgatctccactcaggtggaggttgcagtgagctgattcagcctcccaaagtgctgaaattacaggtgtgagccaccgtgccacgtttcttctttaatattctttagagtattcatcagaactttgcgtatttatttgtatatttccttgttttaatgacaatccctcactagactgtgtgctcaatgagggcagagattttgtcgggttttgttcccttatccccagcagagaacctggcacatagtgggtatttcataaatgttagttggaaagtacagtttatagaatgtagtgacagatcagatgtaattgtagggaagcctggaggatgacctaggaaattccacttgggtgatgctaattgccaaggtgaatataggaagttaggagtgggacaggaatgattatgtggatttgagatgtgtccagttcgagggcttttgggggtggcttggagaaggcaatcttctgctgggaaacttctgactctgtccctactgcagcccagggtaggggctccctacctccacctgggcagatctctgccatcacccatctcactggcgtgctcttgggagcctatctgttccctgggcggtgcagctctacgggatttggaacagtgttgcaggtctcatctctggctcgcagggcccccaggggtgtgtatgcagtcagggctcaataaatgccagtagacggaaagaaggaaggcgaaaaatgtggccagacactcaggggagaggctggggtgaggagcagatctgggaacgtaaatagaactagaagtccaagttggaaccctggagccctagagacagggtggacaaaaaagtgttccaagccaggaggccaggcacagggctaagcgctttattcacatgactgcatttcatcttcatatctacactaaagaggcataattattcctactttgttcatgagaaaacaggtccagagaggtgacgtgatttgcccaaggtcacacagcgagtgagcagcaaagtctggatttgactcagggctgttgtcccctaagcccgcacgcactcttccacttcactccctgcctctccaaccctccacctccctatccctctcccctcccctccggcggctcccccgccccacccctctgccgttccccccaactccctccctgtcggtggcggcggcggagccacgtggtggggccgggaagccgcggccgacgagagcccgggcgactgccccagctgggcagtgctgctctgcgctgcgccgcgctcggggctcgctctccttgctccgcgctccccgccagccgccccggggcaggaggcgcgcctgacggacggcccgctagacaaaggaggcgcggctcggcggggccagcgcgcggacggacggaccatggactcggagcgcgggcggccggccccagccttggggaccggacactcccgggcccggccctaggcgcccggccccgccgcccggcgcgcccagcggggaggacgtggagcccgcgcggcgcgagcaggcggcggccgcggagcaagaagggcgccgcggcgtgcggcccgcgcagcccccggagccatgggcaagtgcagcgggcgctgcacgctggtcgccttctgctgcctgcagctggtaagcgtcgcgtgcccaggcagtcggggcagggtggggcgcggcggggcgcggtcccagggcgtgcgggtggggttgcgtgtgtctctgtgtgtgtgtctggtgcgtgtgcccgggcggggggtggtctggagtcccggagcggtcgggcggagcctgctcccgctggccgggctgtctctttgtgtgcgcttctcgctgctgtgcccggcgcccctccggtccccagtgcgtcnnnnnnnnnnnnnnnnnnnnnnnnnnnnnnnnnnnnnnnnnnnnnnnnnnnnnnnnnnnnnnnnnnnnnnnnnnnnnnnnnnnnnnnnnnnnnnnnnnnnctctgcctttctgccagggagcatccagtgagagatgagctttacaatctgcacatccctgggaggggagtcaccgacaagaggcaggctggtgccaagtgggtaaatgccaaggttgggcctggcaccaccaggcttccctcaccaccttacccaagcctgcagcttccttggtctctgcccaagccttgccatctgtgtggtagcatcagctccacctcctcctgcctccctgcctggaaaaaggcttcttatatcttctcactttatctgaatattccctccccctccccagccagaccctcttctctcctcttctgttgtagttaggactctttgttgcaaatgacaaaaatcagcaggacaaggagggagaaccagctttaggcatggctgtattcagaggcctgaaagatggctcaggacattcccttgtgtgttcagtcttcctcccacacacactctctctgtaccttagctatggctttctcctcaggcgggccatccacctgaggtggccaaggcagccaccaacagctccaagctcacaccacacccattcaggtatcctggcaggatagcagctctgttctgattgttccagcaaatatctagggtgattctcaggggcagagcatggggtgagcgcctatccctaaattcatcattgtctttgattatttggctagacttggcttacctgcccaccccagaaactagaaatgagtcagccccactcaagccatgtggacagagtggtaggaggtggttctttaaagcaaaatttggctgggcgcagtggctcacgcctataatcccagcactttgggaggctgaggtgggtggatcatttgaggtcaggagttcaagaccagcctggccaacatggtgaaactctgcctgtactaaaaatacaaaaattagctgcgtatggtggcaggtgcctgtagtcccagctactcgggaggctgaggcaggagaattgcttgaacctggcaggtggatgttgcagtgagctgagatagttccactgcactacagcctgggcgacagagcgggactctgtttaaaaataatgataataaatatttagaaataaaaaataaacgaccattttatttagttcatgattctgtgggtcagctgggagattcttctggtctgggctatgtgtctgtggtcagctagtgacccggggtgatctagcatggcctcgctcacatggttgatggctgatgggctattagccggggtgccttcgctctcctccccgtggcttctcatcctccagcaggtcagctggggcttgttcacaaggtggtcttgttataagtgaagcaagttggcaagctccaatgaacgccgttttttttttttcttttcttttttttgagacggggtctcactctgtcgcccaggctggagtgcagtggcatgatcttggctcactgcaacctccgcctgctgggctcaagagattctctcacctaagcctcccgaatagctgggactacaggtgcgcaccaccacacctggcaatggtttgtattttttgttgagacggggtttcaccaggttgcccagactggatgcatgcatttttcaagcctttttcaaacatggtttgcattgtgtttgccaaagtccctttaggcaaagcaagtcgcatgggcaagcacagcattagtgtggaagggcactactgaagagcatggaaataggaagaggaggattcgaggccaattttgcaatctattccagctccttcagggaaggggagtgaaaagcattccttctctgtagcccaggaatgccatgggccagggcaagctccagatggggatccttggaagaggtgactcgggctccaggacttccttgccctccaaggctaggggtggcagtctggattctgatcccaccatcttctccacatggagaaggtgcaggagcttgagccgctagagggaagggcctccttggcagggaggaaggtgttctgaaccctcactcctatcacctttcagcccaccccaaagtgatgatcaggcttaaggaccccccagcatccctttggtagtgaaggactggattgttctgaggcttatgcctcatcaccatggtaactggtgccacctgctccccaaggtcaagcaggaatccctgtccttccctttcaggggggtgacagtggcctcagcctgtctcttccacaggtggctgcgctggagcggcagatctttgacttcctgggctaccagtgggctcccatcctagccaacttcctgcacatcatggcagtcatcctgggcatctttggcaccgtgcagtaccgctcccggtacctcatcctggtacggctcacctagccccttcccaagccaactcctctcctcacccctgcccactccacccctccctgctcctcaaaaccagaactgccccccaacactggggcactggtcttggctccacccaaaacaagatggggtgaatgtgcacagccccatgcttctttgctcagaggagacaagggttttttttttcctgaagaattttttagggaaataatccaaatataaacaaaatggatcatgtagtgagtgcctggcacgtgccaggcacgctgcgaaatttcacatgcttcatctcatgtctacaatagccctgtgaggtagatcttaacagctccattttccagatgaggaaactgaagctcagaaaggttgcgagtcttcctaaggtcacacagctaatgaaagcaaggcaggattagaacatcagatcaacagtgaaggctcctgctgcggcaccacacggcctcaggaaggggtgggcgcaaggacacaggagggatgggcttcatcttatttagtttctcaagaagcttcaggaaggcttggcatttgtctctcttgcccgatgtacatcaaggatgtgttctggagcagctagtgtggctttgaggtcagtgcctccctgcactccagccccaggagtctgggtctctctcctcctccccgacagcctcttcccaagtcctggtccctgatagtctctgtcaaactcctgctttcagctagattcacccatattccctgctgttcctcagtgacctcttcacatggctctcttgagggaaaaggcttttcactagatttactacatacatgcttgacacctacaatcacaatgacatgcaatgtcatgctgcctccagagcccacacacactcattctaggacttctctccccacctccacaggctcagttcccagaagccaggtgaacaggaccctaacaaggctctctctcatctgacataagagaacacttctctccagttctcaggaaagccccagacaccactgtcaacaacactatctgccaggtgacagccactagaattgcaggcacaggacttgggtagaagcatccaggtctcaaatcgaccctaacctcctctccagctcactaccgtgggtggaatgctgttctccccagaggtggccacattcgggatgtgggaaaactgaggggcccaggggcctcagtgctgacctagcattgctgccccagcattgctgctcccagtccctcccatcccagccctctccttccagacagatggaaagattgctggagcggggcacattcacctgtgtcattcaagtacaatttatagagcaaggaagggagggaggaaagtgatggagtgagggcatccagggcccaggctggactcccgttctatgcttggggtctcagtttggtctgctcaccccagcctttctccaggccccatccatgatcctgcctccacctgccctggttcccttatacccagactccagccacagccatgtgagaagatgtcacacacatactcaggcacaaggctgcaggataacctcctgtctcttttggtctaaagttcccagcatccactgccctccagcctgggtgacagaccaaaatcttgtcttaaaaaaaaaaaaaaaaaaaaaaacacaaaagaattaagactttttttttttttttgagacggagtttcgctcttgttgcccaggctggagtccagtggcatgatctcagcttaccacaacctccacctcccaggttcaagtgattctccttcctcagccttccgagtagctgggattacaggcatgtgccatcatgcctggctaattttgtatttttaatagagacagggtttctccatgttggtcaggctggtctcaaactcccgacctcaggtgatctgcccaccttggcctcccaaagtgctgggattacaagcgtgagccactgcgcctggcctcttttttttttttttttaaatatgggttttctccatattgcccaggctggtcttgaactcctgagctcaaatgatctgcccacctcagcctcccaaagtgctaggactacaggtatgagccactgcacctggcccatttcctatagtcttaatgggttcatccagctattctgtgctaggcattggcattgcagtggtgagccaggcagtcagagtcctcgccctctagtggcttaccacctggaacatgtttctgaaagtgtcatctgagtcacaatctcctagggattgcttaagcaatcccttttaaacatccctagaaattcagaatcagtaggtctagaggtaggacccaagaatctgcatttttgacaaacatccttgaatgattccagtattctagagacagctggtctagaggatgttgttagcacagtggatgggattagctatcagagaacttgatttgagtggcagccctacctcctcctagctgtgtgatcttagaaaccttaaacttcctttcagttttaagttagttctctctaaaagagggcagtgctgaccttgcagggctgttgtaaggcctgatgggtgtgtaaatgatttgtaagctacactgtgctctctgagtgaggtattctcataatttcccctgcccagatctcctcatccctgagctctgtctccattgacactccccatcccccactccccaggccccaccctgatcccacctctgctttccccagtatgcagcctggctggtgctctgggttggctggaatgcatttatcatctgcttctacttggaggttggacagctgtcccaggtaagcctcagacctggcagtgccatagggcagagcctgaccattcccatcccctgccctaagggtactgtggtataggaccagagcatcatgtctcgaagaagtctctctctccttacatgcccaaataatctgtgtgccccatttcctacttacacaatttatttctggcttcctcaaacacaatgatggagcagataaggctgaagagcagtccatgtgaagatgagccaggggtcccagttgatcacaagctcagtaaaaaccaacagtatgtgggagcccagaaagctactcttaggccccgctaatagaggtagagtattcagagcaagggaggtgaaaatgccatgcgctttgtagtgcttagaccacaaagatttgggttaattctgatcaatatttttcagaagggaaagagactagttagagtttgttcagggaagattgagcagaccaagaaagtaggactgtttcgcttgaataagagcaagcccagagagacacaacttctatttttagatataaaagaggcaaaatatgtgaatttaagagcattggctttgtagtttgaccctgctagattcaaatcccagctctaaaaccttctagctgtattaccctgggcaagtggctgatcctctctgagccccagtttcctcatctagtaagtggacataagagcaactgcaacttcatgtggttgctgaggggataaaataaggtcacacatctgagtgcttggcccctggtcggcaggcagtgagtatttatctgttgaatgagtgactgcatggatgggcacatgggtacacaccctgggtaagaacttctgatctaggccagccccttctccatttaacaaatgtggagaccaaggccccaaaggagaggttcgcccagggtcgcacacagggggagcagtggagatactgaatgggctgttaaggggctggtactgaggatttcacctgtggctgggaaattgttaatgttccttccagctctgaaaattctgaggcccctgtgagtccacacaaaccccttcccatctcagtgacaaaagagtgaggcctgtgtggtcattaagtgccacctgttggtcaaatatggacttgcaggtgcaggctccctgaatcccttcaccgatcaatatagtcttcctgggctgggggagtagctcccccctccctctccctcacactcagtatcccaggcccctttgcccccaggaccgggacttcatcatgaccttcaacacatccctgcaccgctcctggtggatggagaatgggccaggctgcctggtgacacctgttctgaactcccgcctggctctggaggaccaccatgtcatctctgtcactggctgcctgcttgactacccctacattgaagccctcagcagcgccctgcagatcttcctggcagtaagtccttctgtcccccaccctacacacacttcccgatccctttctttagctctggttgaggggatgggttgggcgcagtggctcacgcctgcaatcccagcactttgggaggccatggctggtggatcacctgaggtcaggagttcaagaccagactgaccaacatggagaaaccccgtctctactaaaaatacaaaattagccaggcatagtggcacatgcctgtaatcccagctactcaggaggctgagggaggagaattgcttgaacccaggaggtggaggttgcggtgagccaagattgcaccattgtactctagcctgggcaacaagagcgaaactcctttaaaaaaaaaaaaaaaaaaaaaaaaaaaaaaagagggaatgaacctaggtcttccgcctgtctgtccttttgtctggatctgtttccatatcctgtaccgtcttccctcaccgctgccccagcccctgtgcagagtgaacaggtttagtgagtaggatgaggcatcagactatgaatcaatcctgggtttaagtgctcaatacacccactatgtgactttggacaagtcacctgccttctcggagcttgtttccttattcacaaaaaagaatgacaataccagcctcagagttgtgagaataagaaagtgaccccagtgggcgtgatgcctcatgcctgtggacccagctacttgagaggttgaggcaggaggatcacttgagcccaggaggttgaagctgaagtgagccatgattgcagcactgcactacagcctgggtgacagagtgagaccctgtctgaaagaaagaaggaaaggaagggaagggaagggaagaaaaaaaaaagaaagaaagaaactccaagataggagtagttcctgtttctagaagggccagccctgtcctaggcactttgtacccacaaagtcacataatcctctttcttcttaacaagccataaggtattgcccaagtccaagtgggaaaactgaggctcaaagaggtaaaatgattacttgtctcaagttacactttcagaagagttagaccatgtatgtttgactttaaggtgaaaacatttaattggaagttgttacggtttgccttcatcctggcatgcctcctcccttgccagtcagagcgtacagggcccggcagggggcggaggaagaggttcccactcctccttcctccctgacgtgtcatctccactcccagctgttcggcttcgtgttcgcctgctacgtgagcaaagtgttcctggaggaggaggacagctgtgagtaaggcgcccctggggaagtggggaatctggccctgcgccttcagcaccctggacagaggcctgtgactggccccggcgggagggagcccagggtcggccacgggcccctttcgaggggaagaggcggctggtatggaaggctctgcataccagcccgttccaggctggggtccagacgtccaggtgcccagtccctggccccagcaccccctttccccaatctcgccccaccccatcagaggtcttgtcccgtttagaggctctagccccgcccctgagagccttctctcccataggactgcccggcctcccaggcccaagccttaaggactggggcctgaccctcagctggcccggcctcgccgcctccagacccccagaggcccatccctcagggtccagccgaagccccgccccaggccctgcacggggtctgaccctcgcccctcccctcctcatggcttctctggctccgcttcctagggtgggagtcctgccctcagattcttccccttcaggacccagtctccctctcctcgcccccgccgccgatccctaacatgcgccgcccctcttccgcagttgacttcatcggcggctttgactcctacggataccaggcgccccagaagacgtcgcatttacagctgcagcctctgtacacgtgggtcacggccccctgctggcttggggaggcctgggcgtcggggttgcgaaaaggaggggatggaggagtgggcagggcaaccgggtctctccgcccccatacttttgggatccactctccctaacctgcctttgtttcccgcaggtcggggtagcctctgccccgcgcccaccccggcgcctcgccctgggctgaccgcagctgccgcgagctcgggccaaggcgcaggcgtgtccccctggtggcccgcgcgctcactgcagcctgtgcccaaccccgcgtctgcatctggagatgcggacttggacgtggacttggacttggacttggatttgagcttggctcttcgcagcccggacttcggaggagtggggcggggcgggggaggggcaccacgggttttttgttttttgtttgtttgtttttaatctcagccttggcgtgagctggggccttcctctcttctccagcctctccctttcactcttcacccagcatcctgcccccctgtccaaaaacagcaggacatcagacccatcccatcccaccacactcactcaccagctctggggaaagctactgtgaactaggagcaggattcctgggttctaatcgcaggtccatcactgactgtgacgtctagcaaagcccttgccctctctgagcctcggtttccgcacctcaagtaattaatcccttagcaaatggactcttttagacttctcatttaactcaattccctgagctagactgggattaaaattctcattttgcagtacattaaaactgaggcccagagatgtgatttgcttgaggccacacagctagatttttggtggaagtgggccttgaacacagtgtactttctgcagtttctgactgtaaaacccagtgtctgctctctgagttccatttccaagcccccctccatcttggacctatgtggtctccaccatattcacacaccaccaccaccacttgccaatgcctctcttaaagcaatatacccattcgttctcttattgggaactggatggatgaagccccaaattcagccccacccacagagaagccttcctacactcagcctctgtccacccttggcaaatctttcaagctctctcctccaggaaagtggggccccaactcagtcactccacccccttccaggtccctgaggctggttctactgtatccccatcacctccacaactccactcacccctgacggctccatccacctcaccagttggaaggcttgtggtttcagagaggagcaatgctggtcagcgctgcccagactccagtgtttacagatcaccagcatttacaaccaatccaatggccagaagcctcctctaacaagcccagaaggagttctgaaggggcagatgggggtgtgagtagtcggggagtcgggattgccagcaccctcacccttccttgggggcaagtagaggtgagaacactttccccacctccctccacagacactcctgaggacgctgcatcccacgcactgcctggtgcgtccatagagagaggatcaggtctcagcatttcatctgtgaaagaggcatggccctgggttagaaaggagggcaggagacatggaggaactggggggcacccagatggtgcagatggtttgcacacctgagcctgtctgtggtgaccattccgctcctctcccactaccctccaatctatcattccctactctctaaggccaaaatatcctgagcaaggctggcaaccccaccccaccatcccaaatgcaagcagccaggcccaggagttcctctggcccccacaggcatggagctcccagctggtgggtacagcttgagaggggggcagctccctcaggctaagctactgcccttcactgggccagccctgcctccagccctcacctctctcaccccaactctcccccaagcccctttctactcaacgggtgtagccactggtgctttgaagccttttgtttttataagatggtttttgcaaggggaccaggttctcttttcactgggaccttgcaaggaggggagtgctctcctggtttctgtgcaggcgggttgattaaagatggtgttttcttctctatcttcctgtcctgcccattgggtctatagaactttctaagtgagaagtccctgcatgagggcaggcaggaatgatttgatgttgatgttatcaaatattcctggggtggccaggcacggtggctcatgcctgtaatcccaacacttttgaaggctgaggtgggcagatcacgcgaggtcaggagtttgagaccagcctggccaacatgatgaaaccctgtctctactaaaaatacaaaaattaggcagggccgggaggctgaggaaggagaatcacttgaacttgggatgcagaggtggagtgagctcagatggcgccactctaccccagcctgggtgatagagcaagactccatctcaaaacaataaaaaagaaacaaatcctggggcactggcctgtaactctgactgggtgtgtagctttaggcaactcactctccctctctatactcatccaaaaaaaaaaaaaaaaaaaagcagaggtcaaacaaaatcagtgggttcccaaatgtggcttcataatcccttagagatcttcctacttattttcctgataaaatgcattttaagtttatgctttcaaatatcctttgcatcttggctcttcctgagaattcagttccgggtgtggaatgaagtgacacacagtgctttagacacggattcctgcatccaacctttgatatcctggatacttttctggggatacagcgcaagaatcagtatttagaatgttttaatttgtgtgtcggcaggtatgtgggtgaacgggtaatatgtatataaggtacagaagtcagaaggtcccagtgggattatatactcatacctttttttcatatctttctaaggataggccttttttaaattatacaatttttggtcaggcatgatggctcatgcttgtaatcccagcacttttggaggcagaagcaggaggactgcttgagccccggagttccagactcaccttgggcaacatagggagacctcatttctttaaaaaaaagaaaaatgtaaaaattagctgagcatcgagtggcacatgcctttagtcccagctgctcaggaggctgagtcaggaggattgcttgagcccaagaagttgaggttgcagtgagagctgagattgtgccactgcactacagcctgggaaacagagtaagactgtctcaaaaacaaacaaacaaaattacacatttttttgtttttcacacaaatggcaacatattctacttactctttgaccccctgctttttttccccccccttgagatagagtctcactctgtctcccaggctgaagtgcagtggcgcaatctcagcttacttttacctccgcctcctgggttcaagcaattctcctgcctctgcctaccgagtagctgggattacaggtgcctgccatcacacctggctaatgtttgtatttttattttatttatttacttatttatttatttttgagatggtgtctcgttctgttgcccaggctggagtgctgtatttttagtggagatcgggtttcgccatgttggccaggctggtctcgaacttctgacttcaagtgatccacctgccttggcctcctaaaatgctgggattacaggagtaagccaccacacctggcctctttcacttaatcttggaactcctcccccaataattcctgtggagcatcctctttttcttccatggtgacaggtcttaatgcagctggcaggtaagaatcagaggtccttaaataatgatgccccaggtcagttatgcaaacccctgtggaccactcctgaccatggggtccagaggaaaataagccacagacacagaacctccaaggagcttctgatcttctgctgatagcgggcagtcaatgctgagggcacagagtagagtgaaaggcaatcattaataggagttcaggagagagatctgagtgccccagcagaggcaacagcatgagcaaaatggtggaggtaggaaaatacatagtggccgggtaagaatagttggagacgaattggttggagaaggcttcagtagataatatatttgtttatattcgtttcctatttctatttttctttttcttttttttttttttaaattgatcattcttgggtgtttctcgcagagggggatttggcagggtcataggacaatagtagagggaaggtcagcagataaacaagtgaacaaaggtctctggttttcctaggcagagtgtttgtgtccctgggtacttgagattagggagtggtgatgactcttaacgagcatgctgccttcaagcctctgttaaacaaagcacatcttgcaccgcttttaatccatttaaccctgagtggacacagcacatgtttcagagagcacagggttgggggtaaggtcatagatcaacaggatcccaaggcagaagaatttttcttagtacagaacaaaatgaaaagtctcccatgtctacttctttccacacagacacagcaaccatccgatttctcaatcttttccccacctttcccccttttctattccacaaaaccgccattgccatcatggcccgttctcaatgagctgctgggcacacctcccagacggggtggccgccgggcagaggggctcctcacttcccagtaggggcggccaggcagaggtgcccctcacctcccggacggggtggctggccaggcggggggctgacccccccacctccttcccggacggggcggctggccgggcagaggggctcctcacttcccagtaggggcggccgggcagaggcgcccctcacctcccggacggggcggctggccgggcggggggctgacccccccacctccctcccggacggggtggctggccgggcggggggctgacacccccacctctctcccggacggggcggctggccgggcagaggggctcctcacttcccagtaggggcggccgggcagaggcgcccctcacctcccggacagggcggctggccgggcggtgggctgacccccccacctccctcccagatggggcggctggccgggcagggggctgacccccccacctccctcccggacggggcggctggccgggaggggggctgacacccccacctccctcccggacggggtggctgccgggcggagacgctcctcacttcccacacggggtgttagccgggcggaggggctcctcacttctcagacggggcggttgccaggcggagggtctcctctcttctcagacggggcggccgggcagagacgctcctcgcctcccagatggggtcgcggccgggcagaggcgcttctcacatcccagacggggcagcggggctgaggcgctccccacatctcagacgatgggcggccgggcagagacgctcctcacttcctaaatgggatggcggnnnnnnnnnnnnnnnnnnnnnnnnnnnnnnnnnnnnnnnnnnnnnnnnnnnnnnnnnnnnnnnnnnnnnnnnnnnnnnnnnnnnnnnnnnnnnnnnnnnnagtgcgtcctgtgcgcgagtccccggcccgcccgcactgtacaagtggcctcctgttgggggatgcgctgtgggacggtggcttgctg

SEQ ID NO: 1698 - protein, 938 aa, Homo sapiens
  MOD_RES (364)..(396): Variable amino acid
MISISDEETGSAVLSDLLLVMAVAISQWDPGWDREAARLQKPWKKDRREGCACVRVCECVCAHVFVRARACVHVCMCVCVRVCVHVPHALFHFTPCLSNPPPPYPSPLPSGGSPAPPLCRSPQLPPCRWRRRSHVVGPGSRGRREPGRLPQLGSAALRCAALGARSPCSALPASRPGAGGAPDGRPARQRRRGSAGPARGRTDHGLGARAAGPSLGDRTLPGPALGARPRRPARPAGRTWSPRGASRRRPRSKKGAAACGPRSPRSHGQVQRALHAGRLLLPAAGKRRVPRQSGQGGARRGAVPGRAGGVACVSVCVSGACARAGGGLESRSGRAEPAPAGRAVSLCALLAAVPGAPPVPSASXXXXXXXXXXXXXXXXXXXXXXXXXXXXXXXXXLCLSAREHPVRDELYNLHIPGRGVTDKRQAGAKWGGDSGLSLSLPQVAALERQIFDFLGYQWAPILANFLHIMAVILGIFGTVQYRSRYLILYAAWLVLWVGWNAFIICFYLEVGQLSQDRDFIMTFNTSLHRSWWMENGPGCLVTPVLNSRLALEDHHVISVTGCLLDYPYIEALSSALQIFLAGAEEEVPTPPSSLTCHLHSQLFGFVFACYVSKVFLEEEDSSPWTEACDWPRREGAQGRPRAPFEGKRRLVWKALHTSPFQAGVQTSRCPVPGPSTPFPQSRPTPSEVLSRLEALAPPLRAFSPIGLPGLPGPSLKDWGLTLSWPGLAASRPPEAHPSGSSRSPAPGPARGLTLAPPLLMASLAPLPRDPVSLSSPPPPIPNMRRPSSAVDFIGGFDSYGYQAPQKTSHLQLQPLYTLCPAPTPAPRPGLTAAAASSGQGAGVSPWWPARSLQPVPNPASASGDADLDVDLDLDLDLSLALRSPDFGGTGRPGRDAPRLPDGVAAGQRRFSHPRRGSGAEALPTSQTMGGRAETLLTS

SEQ ID NO: 1699 - DNA, 1453 bp, Homo sapiens
  source
  (1)..(1453)
  CDS (201)..(1253)
  modified_base (391)..(391): a, t, c, g, unknown or other
ccgggccacgtgaccgcgcgtgcacgtgttccggcctctccgcttcgccgctccgaacctcctcctggtcgtcccggcattcgtccacgcggagccggcttgggcggggcccgggaggcggcggccggagaagccgcggagacgcgagcgccgagcgtcgcgagggagcaggcccgggcaggcaagcggcggcctccgccatgaaccccaggggcctgttccaggacttcaaccccagtaagtttctcatctacacctgcctgctgctcttctcggtgctgctgcccctccgcctggacggcatcatccaatggagctactgggccgtctttgcccccatatggctgtggaagcttctagtcgtcgcaggcgcctccagtggggtgacgtntgtgggaccagccgacatctgctaccgcaccgagggagaggcctgtgtggagttcaaagccatgctgatcgctgtgggcatccactgctgctgctcatgttcgaagtcctggtctgcgaagggtggagaggggcaccacttctggctgctggtcttcatgcctctcttcttcgtgtcccccgtgtccgtggctgcctgcgtctggggctttcgacacgataggtcgctggagctggagatcctgtgctcggtcaacatcctgcagttcatcttcatcgccctaaagctggacaggattattcactggccgtggctggtggtgtttgtgcccctgtggatcctcatgtcgttcctttgcctggtcgtcctctattacatcgtctggtccctcctgttcctgcggtccctggatgtggttgccgagcagcggagaacacacgtgaccatggctatcagttggataacgattgtcgtgcctctgctcacttttgaggtcctgctggttcacagattggatggccacaatacattctcctacgtctccatatttgtccccctttggctttccttactaactttaatggccacaacatttaggcgaaaggggggcaatcattggtggtttggcattcgcagagacttctgtcagtttctgcttgaaattttcccatttttaagagaatatgggaacatttcatatgatctccatcacgaagatagtgaagatgctgaagaaacatcagttccagaagctccgaaaattgctccaatatttggaaagaaggccagagtagttataacccagagccctgggaaatacgttcccccccctcccaagttaaatattgatatgccagattaaactcctagagaggacccaggcacacacagactccacttggccttcgcctcttgttcattcatcccaaacctggaaatggaaacaggcttcaaacactcgtctcacgccgtgtttgagatcaccgcctcatcagtatgcatcatagatggaggtggtttcagtatgtgggtgtgtgtgatgtgtacctgggtaagagactt

SEQ ID NO: 1700 - protein, 350 aa, Homo sapiens
  MOD_RES (64)..(64): Variable amino acid
MNPRGLFQDFNPSKFLIYTCLLLFSVLLPLRLDGIIQWSYWAVFAPIWLWKLLVVAGASSGVTXVGPADICYRTEGEACVEFKAMLIAVGIHCCCSCSKSWSAKGGEGHHFWLLVFMPLFFVSPVSVAACVWGFRHDRSLELEILCSVNILQFIFIALKLDRIIHWPWLVVFVPLWILMSFLCLVVLYYIVWSLLFLRSLDVVAEQRRTHVTMAISWITIVVPLLTFEVLLVHRLDGHNTFSYVSIFVPLWLSLLTLMATTFRRKGGNHWWFGIRRDFCQFLLEIFPFLREYGNISYDLHHEDSEDAEETSVPEAPKIAPIFGKKARVVITQSPGKYVPPPPKLNIDMPD

SEQ ID NO: 1701 - DNA, 1141 bp, Homo sapiens
  source
  (1)..(1141)
  CDS (201)..(941)
  modified_base (98)..(98): a, t, c, g, unknown or other
  modified_base (112)..(113): a, t, c, g, unknown or other
  modified_base (116)..(116): a, t, c, g, unknown or other
  modified_base (128)..(128): a, t, c, g, unknown or other
  modified_base (139)..(139): a, t, c, g, unknown or other
  modified_base (148)..(148): a, t, c, g, unknown or other
  modified_base (166)..(166): a, t, c, g, unknown or other
  modified_base (212)..(212): a, t, c, g, unknown or other
  modified_base (240)..(240): a, t, c, g, unknown or other
  modified_base (574)..(574): a, t, c, g, unknown or other
  modified_base (811)..(910): a, t, c, g, unknown or other
taataatgcctctagccttgggaggtggtggccgttagcatcacaggccttgagagagttctgtttctaagatcttttcttgctctgccccaccggtnaatgcttttgcccnngcnaagtaagtcccngggcagtctcngtcgggcanttactctttgtcatgttnaaagagagggtttgtgtgagacggctggtgtgggatgagctgctgngcccactgtttctttgcctttacttgcngtcgcgtttttgcttggtcctggttttttttgggggttcccatttcttttcgcacccccttccactttggggcggggggccttttcctctttctcggggtttcccccccctaccgccttttttctccctcttctcctcttttctcgcttgtctcctttctgcctctgctccttgggtctctcttcctccctttgtcctttgcttttttttttccttttgttctccgtgtctccttggtccttggttttgctcgttttccttcttttctcttctttggcggttgcttcctttctttcccccccccggttggtttgtgtcttcgttgttttctccntcctctcttcttttttctcttctctctcctcccctctctccctcttcctccctctcttggctctcttccccgtgtcgcccccccctccttgttcttgttttttgctccgcttgtttctccccctccgctgccctctcctcctccctcttcgctctgtcttctctcttgctctccggttttttgccccgtcgtggtctatcttgcgactttttctctagtgaaaatgctccactttgnnnnnnnnnnnnnnnnnnnnnnnnnnnnnnnnnnnnnnnnnnnnnnnnnnnnnnnnnnnnnnnnnnnnnnnnnnnnnnnnnnnnnnnnnnnnnnnnnnnncttctgcaaaagaatcataaaaaaaccttaaaattcgactgatagcctggggaaaatatttgcaacatattcaagagtcaaaatattaatatcctggccaggtgcagtggctcatgcctgtaaccccagcactgcctgtaataccagcactgtcggaggacgaggcaggtgaatcacttggagttcaggagttcaagaccagcctgggcaaagtggaaaaagtctgtcact

SEQ ID NO: 1702 - protein, 246 aa, Homo sapiens
  MOD_RES (4)..(4): Variable amino acid
  MOD_RES (14)..(14): Variable amino acid
  MOD_RES (125)..(125): Variable amino acid
  MOD_RES (204)..(237): Variable amino acid
MSCXAHCFFAFTCXRVFAWSWFFLGVPISFRTPFHFGAGGLFLFLGVSPPYRLFSPSSPLFSLVSFLPLLLGSLFLPLSFAFFFPFVLRVSLVLGFARFPSFLFFGGCFLSFPPPVGLCLRCFLXPLFFFLFSLLPSLPLPPSLGSLPRVAPPSLFLFFAPLVSPPPLPSPPPSSLCLLSCSPVFCPVVVYLATFSLVKMLHFXXXXXXXXXXXXXXXXXXXXXXXXXXXXXXXXXXFCKRIIKKP

SEQ ID NO: 1703 - DNA, 1417 bp, Homo sapiens
  source
  (1)..(1417)
  CDS (201)..(1217)
ttttaacctatatatacgtatacagactatatgcatgtgtatatacgtgtgtatatacatatacacatacacactatatatacacactcctccatatatataaaatatattcttatagatgtatatttttgttttttaaatgtgtgtatatacacatatacacactatatgtgtgtatatacatactatatacacactatatgtgtgtatatacatactatatacacactatatgtgtgtatatacatactatatacacactatatgtgtgtatatacatactatatacacactatatgtgtgtatatacatactatatacacactatatgtgtgtatatacatactatatacacactatatgtgtgtatatacatactatatacacactatatgtgtgtatatacatactatatacacactatatgtgtgtatatacatactatatacacactatatgtgtgtatatacatactatatacacactatatgtgtgtatatacatactatatacacactatatgtgtgtatatacatactatatacacactatatgtgtgtatatacatactatatacacactatatgtgtgtatatacatactatatacacactatatgtgtgtgtatgtacatactatataacactgtgtgtgtacatactatatacacactatatgtgtgtgtacatactatatacacactatattgtgtgtacatactatatacacactatatgtgtgtgtacatactatatacacactatatgtgtgtgtacatactatatacacactatgtgtgtgtgtacatactatatacacactgtgtgtgtgtacatactatatacacactgtgtgtgtgtatatacatactatatacacactatgtgtgtgtgtatatacatactatatacactatgtgtgtatgtgcatactatatacacactatatacacactatgtgtgtacacacactatacacactatgtgtacacacacactatatacacactatgtgtgtacacacactacagacactatgtgtgtacacacactatatacacactatgtgtgtacacacacactatatacacactgtacacacacactatatacacactatacatactacatatatactatatagtgtatatgtatatatgtgtatatacacataatgtatatatatttacatcattcatgagcacttatttaatttaatcagtttttgtggtttctgcactgtttcttgtagttcatatcatcatttttctttgatttattggtttttgctagaattaatccttaagaaattcttttagagcttggtatgggttatacttaagtccttacatacctgcaaatgatttcaatttgccctcctacttgaatgctaatttgactaggtatgcgattctaaa

SEQ ID NO: 1704 - protein, 338 aa, Homo sapiens
MCVYTYYIHTICVYIHTIYTLYVCIYILYTHYMCVYTYYIHTICVYIHTIYTLYVCIYILYTHYMCVYTYYIHTICVYIHTIYTLYVCIYILYTHYMCVYTYYIHTICVYIHTIYTLYVCIYILYTHYMCVYTYYIHTICVCMYILYNTVCVHTIYTLYVCVHTIYTLYCVYILYTHYMCVYILYTHYMCVYILYTHYVCVYILYTHCVCVHTIYTLCVCIYILYTHYVCVYIHTIYTMCVCAYYIHTIYTLCVYTHYTHYVYTHTIYTLCVYTHYRHYVCTHTIYTLCVYTHTIYTLYTHTIYTLYILHIYYIVYMYICVYTHNVYIFTSFMSTYLI

SEQ ID NO: 1705 - DNA, 14562 bp, Homo sapiens
  source
  (1)..(14562)
  CDS (201)..(277)
  CDS (10102)..(10174)
  CDS (10895)..(11066)
  CDS (11315)..(11635)
  CDS (12223)..(12333)
  CDS (13893)..(14362)
tttgccagggccacggcgtggccaccaaagcgctccaggacgactcggcagagcgcgggcaccgtggctcaggcgcgctccccgggggcggggcgagcaggaggggtcacgtgacgcccggcccggaagcgctcgcgcaggagaccccgggtgacggggcccggcgccgctaactggagcgaaccccagcgtccgccgacatggcctggaccaagtaccagctgttcctggccgggctcatgcttgttaccggctccatcaacacgctctcggcaaagtgagtctgggccctgccgggcgtgcgggccctggcgaccccggcgctcgttctacgccttcccccttcttggccctgccctcctggcttcccctgctttcccacttgctccggtcagttcgcgcgcgttatgaccacccaagggatgcgaggcccggggaaatgcggagcggggctgcgccccggacggggggatccgagccccggctttgatttgctgtacagcctccgctcctgtttccacgtcttttaacaggagggttggccgattcctttccacggcccttccagtgctggcgtccaagcctgagcacctccctccacgagctgggagagacccctggacttgtgcacatgagccgcagtagtggctgtgcaggccgagtgacccagtgagcgtggaggcctcaagcggcagacagggaggtgccccacggcccctcaaggatgaggggttagagctgtgctttgaagcttaggtgggatttcggaatgtgtctgagactgtaagtcaaggaaagtctacggaaaggccagatcaaagtcgattgtaaccagcatcaaatgcccaggttagattttctctcataatcagaaaagtgcttttgagctggggaatgacatgttgaaagtgatatgattgactcaatgacatgaggagtggtttggtgcaggaaaaaccactccaaggctgctgcatagcagatgaggggaactaggaggtggcagtgagaagagaaaggaagggacaactggtggcagagaccaggtgtgaatggccacaggcctgacccacatgagcaagaaacaaggatcactccagggtttctgcctgggagaagaaaagtgccattaactcagacagagagggcaagtggccagttcagctctgatgtatgggggtgagaggggggacagttcccaggaggttagggactaaggacccaggcagtcatgagactgagggacagggcctagcctcccctctgttgtgggcaggatggcatttctttgtctctctctgtctccatctcagggcagggccttcctgcccctccttttcttgttgcccaggctggagtgcaatggcacgatcccatgtataaggtacctacggtgtgtaagggaaggggacagaagtgaccaagaggcgatctctgcctttgagatgcttggaatctgaggtggaggagacagacgtgtacgcacacgacagtcacagtgttctcccttccccaaacggtgggcacagtcagtggagtcctgggtgggccccacctgttcctctggttcacctctggccaactgtgccttgtggagaactactagcttcccaggccctgcatcctcctgaggatcactcctcatgctgaatccttagctgttcagaggccccagcctgagggctcccatctcaggatctgaacacagcaaagcaagtcttctgttctgtcatgccagccagggcctctgtcaagtgcttagagagcggttgtaagtccaccagggctgctgcccacaaggagaatccagattgccagttactgctggggtaaactgtgctgattcacctccttccttagaaaactccaaaccagtcaggtaggaagcttagagatcctcaatcccagaaggcgtcgcctttaaaggctgcctgagagtcaggaaagaggctcccaggtgacagacccaacttttggtcctgtcccctgcctgacagctggtgtggggcctctcaggatcctcccaccccaagatgggcccccaaattggaccctaaacagtgttctaaggtcaaaccacaagaagggatactcttagggagaaagaacatgtgggagcagctgcatgcaccccgatgtgaagtatggatttgaaatcacatttctggcccggcgcggtggcttacgcctgtcatcccagcactttgggaggcagaagcggctggatcacttgaggtcaggagtttgaaaccagcctgaccaatatggtgaaactgcatctctactaaaaatacaaaaattagctgggcgtggtagtgcgcacctgtagtcccagctacttgggaggctgagacaggagaattgcttgaacccgggaggcggaggttgcaatgagccaagattgcaccactgccctccaacctgggtgacagagtgagactcggtctcaaaaaaaaaaataaaaggaaatcacatttttgacccacgatttccagcaggcacagacagacaagcatgtgctgacaactagcagaagcatctcatgcacaaagagcacctcgcatgccccaggccctgctctgccctttcatgtgtgaactcagggaattctcataaccaccctatcaggcaaagacaggggctgatattcctgtataaggaaactgaggtaggaaatgattaaattccttgcccaagttcaacttagctactaagtggcagagtttatagttgagccagcatggtctggctctagcatccatgctcttaaccaccactggagggtgtggctggggacttctccagtcattttggggtcatttagagttgttaaaagcatagaaatcatccagtctaatccccacaatttacaaaggaggcctcaggagaagtttctttctgtgattcaactgtttggtgtctgaatgaaggctggaacccaggcctcaggactttaagtcctgttcttttatgactgtgataccccagagtccctccttcctgggagtttcctctcacagctccccaggccaggacagagaagcctgtgcttgtggaagttgtaaacctgtaagtggcatctgcgctcccagcctttgatgtgcctctctccaggactgggctgccagcctctcagccagcccagagacactgctgacagggtcctcccgctggagtccaggccactcaaggttcagactgacagcctgtggttgtctctggcagtttcttggcctgtgacaagagtgatgtttcccttcccaggttcttgggaggatgaaaggcagtggatgaggaagcacatctgagcacgtgctgcctgctgtgctggggcggcaggtcagctttcctctctgcggccccatccctgggtcctggcagggggcccctccctgtgaagtggcttcttctttccctggctgttttctcaaaacctcctcactagcaccttctgtcgatcatcttctttaggccaagccatttctgtctacgtgagccagtgccccatccacaggtactcatttcagaaccccagtctcctgaatccaactgaggttctacatatgaagagccggggtcagctgggcactgtggctccagcttgtaatcccagactggaggctgaggtgggatgatcatttgagcccaggagttcaagatcagcctggacaacatagggagacctcgttctctacaaataataataataaataattaattaatagagccagggtcaagtagatgctcactaagtaaggctcagctcccctcctaagttctgcaggctgtagggccctcccagccaggcagggatatgagcctgacttcctttcatgcccaggccagggaccctgccaagaaggtggcaggaagcctggaaaccactaggcctctactagagaagaggtgtttgctcttcttctgtgtcctttctgtgccagctccaatgtttgcccttggcagctgccccaccacccttgggttccatgaactggcatgggataattgcttcaaaggggttgttgggccagcttgtggaagccttaactcaggaggacagtgtagtagagtgggaagttcatgaggcttgggacctgaggaatagatgagccactggacctctgtgagcctcagttttctcatctgtaaaatggacttggtgatccctgccgtaccttcttcctggacactgaagatctactgaggaaggtttccttttttttttttttttgagacggagtctggctctgtcatccaggctggagtgcagtggtgtgatctcagctcactgcaagctccgcctcccgggtgaacgcattctcatgcctcagcctcctgagtaactgggactacaggtgcctgccaccatgcccggataatttttttgtatttttttagtagagacagggtttcattgtgttagccaggatggtctcgatctcctgacctcgcccatctcggcctcccaaagtgctgggattacaggcatgagccactgtgcccagccttttttttttttttttttaagacacggtctctctctgttgcccaggctggagtgcaatggtgccatctaggctcactgcaaccttgagccatcctcccacctcagcctcccaagtagatgggaccacagacacccgccaccgtgcccacctaatttttgtattttttgtagagacagcgtcttgccatgtttcctaggctggtctcaaactcctgggctcaagcaatccacctgcctcagcctcccaaagtgttgggattacaggcatgcaccaccacacccagcttaaggaaagttttccattccatggagatgagagggctcaccattgtcacctcaggagccagggccacctgctgtggcaccccagagagtggagaagccttggcccttctgtaggtcccaggcaggagaaagaaggggactcactgggcttgacaagctggggacacaagaggaagtggcagagattctgtgggaatggccacagctaatctgcccaagccagccccatcgccacttcctcagtctgttttcgccacccccgttcacgtggacgtgcacacctcccagaatgctgagctttgagtttgggcctggccatgctagggagtgactcaccacccagcacggagagcctactccccagcctgcccgccaaaaggagcggcctcagcttgtccccgctaggacccttcgggcctcctgccctggaggtcatctcccctagaatacagtgtctgtggagaagacaggcccacctactgggctgcccctctcctcccaccagctaggggagcaagaactcagaggagagcttcagagcatcagggagggggcgcatgactgcctgctgagcttccagtgtactggccctgtttcaacatctgaggagccgtgagcccctcgagccctctctggcccctgggttcctgtctgtcaaataaggagttcagctgatggctgagtttcttctgtttcagcattttggctctgtgaactgcagggacaatagcctgaggtccctccagccacctctgcctcagccagcaggacaggttccagacgtttttccagtagctttcaggctgaaggggagctggggccacgctgaacccaagggggagatggcttctgctcagtgaagggaaaggagaaggggcagaaaatgagttttgctgaatacctgccatgtgccaggtcatgtatatatccttatatcatgtattgcttctgacagtttgtcagtgttggtatgattaccctgtaacttgtccagcctgtgggactcaaaactctgggttttctctgtattctgccttttctgagtataaattcaagcaaggtttaaccctggatctgccttaagcctcagagtccccatctaaaatgaggatccttgttgtaaggcttaacgggacagtccccatgaagtgtcctatgaattgtgcatttaaggaaacatgggctgggtgcagtggctcacacctgtaatcccagcacttcgggaggctgaggcaggtcaatctcttgaggccaggagttcgagactagcctgggcagcataaacaaggctgcatctttgcaaaaaatacaaaaattagccgggcatggtggcccatgcctgtagtcccagctactcaggaggctgaggtgagaggatcatatgagccttgggaggctgaggctgtagtgagccgtgattgtgccactgcactccagcctcagtgacagagtaataccctgtctgaaaaacaaaacaaaaaaacaaacgttgttggccggacgcagaggcttatacctgtaatccgatcactttgggagattgatacgggtggatcacttgaggtcaggagttcgagaccatcctggccaacatggtgaaactccgtctctacaaaaaatataaaaattagctgggcatggtggtgggtgcccgtaatcccagctacttgggaggttaaggcaggagaatcacttgaacctggaaagcagaggttgcagtgagccaagatcgcgctgctacactccagcctgggtgacagagggaggctccgtttcaaaaaaaaaaacaagaacaaaaacaaaagacaacaaacaacaaacgttgtgaagaactgacagcaaagtgctgcccaccttaggggtcactgctgtcatccccaggcaaactggggctggatttttgttctagcctgtgaggctggggtcttttctgattctgcgccaggagtcgaaacctgtctccaatccaggatgagaagcctggctttctgccccaaggtacctgcaggcctgagcatctcaggctgggcaaggcagcccatgctgctgacacccaatcccttgggctgtcagcctgccccaggccctcagatacaaagagataccatttccccagccgggagcgctgccagccaggcctgtctaggcagacctacccgtggagaaagcgaagacaacccctgtgggaggtggggagctcagcaccagccctacagtcagctccccaagaagcgccccagccttggggaaggacaggccccgaggggtttcccctatggaccaacttgttctaccagcagggggccctcagactcaggtgggaagtaggactcatggaaatgtggcctcagcttccatacctgccccctacagacaaaaataataataaaataaataataatccttgcctgaagcttctgatcaaccttcatggcctggcaatagctcccttgtccctcctagaggaaacttggctcctggcctggggattcccatctctctgacttcacttgctctgggcagttggctctgtgcccttggtaaggcttgacctcttctctcttccttgctttgcctctgtttcactcagttgcctcatgcaggccttctcagggggctctttctgcaaaagcaagactgggttcgagagcagccctgctgggtctgtggcccttacccatgttccatgtcctgtcctggccagggatccaagagccaacagcatatcaggcagaaattaggcaccatgggtgcagtggctcatgcctataatctcagcaactcaggaggctgaggcgggaggattgcttgagcccaggagttcaagaccagccatggcaacatagtgagaccctctctctaaaaaaaaaaagagaaagaagtgagactccagcccatgaggtcaggtgtttcctgacctggggtggaggcttccccagctcccagactccctgttccatagcaggcgctttctttgccccactggtactggttacagcctggtccccaagccatgccaggctccaggtttctctctgccttctaaacagttctgtccgaacttctcccttcaactctcctttgcccctgccattcccaagaaccacaaggaatcttaactacccctctttctccacatctccaggagctggtggggtctctcactatggaataggtttgccatagccctgttttcttccgcaaactcagaggcatatagagaagccaaagctggacagggactttgtcaaacctagaccctaactgcggcacaaccagtggcacatgctctgggtgctgcgggggaggtacaggaaccagaggactcccccgccctttgggagctgaggctcgctacagagatgagccaatggcagtgcagggctgtgcactgcaatctgactgccctggaaagacatttcaaggaaaggcatttaataaaaagaagtcccgagtcttgcactttaaagacatccactgcctatgcaggatatgctgcagtgggagcaggtcggtggcccacaggaaacggctctgggactgtgttgacttcagtcagcacatgatgttactgatgcatttggagctgtgtcaacgaacccagggtgtcaacatgagggagggccacgccttgctagcctcagtctgggccagatcacatgctcttggctctgggcctgggtacaccagagtacttccagaagtcagtggccaggggtgaaaggttaggagaggctggagctgtttagccaggagatgagaagattcagaagaaggtcaacaagtccccaggtacctaaagggctttcaaatgaaagattagacaagattccacagacctaaccaagcccagcaaagacgaaattcaagacagagaattttcatgcacagatggcagacagttcagagtgattggtggttaagctgcccaaagcactatgccacaaaggattctgggcttgtgtctaggctcatcggggaagtatgtcataatcagtcatcaccatctgccgggtgctgactgggaggtcatgccatgagtgtgatgtctttgccacctgcttgaaagtcagcattagaaagatcttccaaaccattcaggctttttgaaggtgagcaggtggtctgtattaagtcatttcccaggacccaaatactcctgtagaccagaggttcttgatatttttcatgccatgggactctttgacagtctggcacagcctatggacctcttcttacagtaatgttttaaaacgtgtaaataagaccaaggattgggccaggcacggtggctcacgcctgtaattccagcacgttgggaggctgaggagggtggttcacaaggtcaggagattgagaccatcctggctaacacggtgaaacaccgtctctactaaaaatacaaaaaaaaattagccaggcgtggtgtcgggcgcctgtagtcccagctgctcaggaggctgaggcaggagaatggcgtgaacccgggagacggagcttgcagtgagccgagatcttgccactgcactccagcctgggcgacagagcgagactccattaagaaaaaaaaaaaaaaaagaccaaggattacaaaagaagtcaattaaattgaaatacagttatcaaacacttaaaaaagcaaattcgtgatatagaatatatatagatatgctttttttttttttttctgagacaggatcttgctccatcacctaggctggagtgcagtggtgcaatatcggctcactgcagcctctgtcccccaggttcaagtgagtctcatgcctcagcctcctgagtagctgggattacaggcttgtaccaccacgcccggctaatttttgtatttttagtagagacggggtttcaccatgttggccaggcggtctcgaactccagacgtcaagtgatccacccacctcagcctcccaaagtgtcgggattacaggcgtgagccactgcgcccagctatatagaaatgctttctactacattgttataagtgggtctgactactgtaatgttcatgagtgatgagtgtaaatgatacctcacgatatatacaatgactgtaatgtgatcatgagagtatctgtgatttctgtgcattacagaggcacagacacagtgacttgaggaaatgccaagttaaaactccttgaggtgaagactgacccctttgagagggagccccactctggggccgggtcacccaggtctgggcctcttgacattgagaggtgtgagcctcttcactagcaccagggtaggatgctgacagggtctgaccttccctctctctcctacagatgggcggacaatttcatggccgagggctgtggagggagcaaggagcacagcttccagcatcccttcctccaggtatctggccctgtccctcctacctcctgtctcccgggcctcagaccaggcgccacccccggccatgaggccaggctgtttcctgacttaggagtggaggtgtctcctgctcccagaagagccatccacttctctctttccctccccagagcagaatccaaggtttagaatagggcaaagagcaccatcctctgcgaaagtcctggcaagtggtcatgtcctcaccacatccaagtcaggacacgtggaaaacatcagccctagtgacaaaagtcagctctctatccactgggagcccagaccccaattgggacagggcagacaccataaatggaagacactgttcgttgaactgagaatcaggagactcaaatgtcagccccagctctaccagcaacttgctttgtggccttacataagtctttgagcctctcttgggtctaggcttctccacctgcgatttgactaggggttggcctagatggatggttttcagacagggctctgcacagccttagggttcatcaggatgtatgggggctttggggcagacctaggaggctgtctctagcctccatggcagctctgcatttgtctattttacatattggggttctgggtaagctcttgtttgacaaaagtttgcattaaaaaaaatagttaaagatgatccccgagatcccttccagctctgaagtcctcgggttttcatccctgcaggcagtgggcatgttcctgggagaattctcctgcctggctgccttctacctcctccgatgcagagctgcagggcaatcagactccagcgtagacccccagcagcccttcaaccctcttcttttcctgcccccagcgctctgtgacatgacagggaccagcctcatgtatgtgggtgagtaaccaggccaggctgagaagggctcaggggaagctgtggctgaaggggctactggtgaaacagccctatcccacccacctccacttcatcccaccattcccccagacttcacacgcacaggcacacaggcaggactgatcgagcgcttactatgagcttggcatgtctatcaccaaagaccccttagtgacagatggccttcgccttgggaagctaactgtaatttgtttctcctttcctagctctgaacatgaccagtgcctccagcttccagatgctgcggggtgcagtgatcatattcactggcctgttctcggtggccttcctgggccggaggctggtgctgagccagtggctgggcatcctagccaccatcgcggggctggtggtcgtgggcctggctgacctcctgagcaagcacgacagtcagcacaagctcagcgaagtgatcacaggtgcggccaggggcagggacacggggctgccctatcctgccctgtcctccttgggagcccagcacagactcatacaagctctgccatgtgccatataccaagccctgggtgaggtgggtagctctggaggtgatggatagaatgtagggaagactgcaaagggatgtggctccaccaaggatgagtggcaggccgggcagggcgaggggctggcttgtcctttgatacagatgcagacatgcaaactactggatttgggagtggaaaggaacaggtgcttaccaagtgcccagcctggtgctgagcactgtgtgttcatcatcacagtgactcccacaggccccaaacggatgcatcacagcccattttacaatgaaatgactgtcctgggtcacttagggtcaggatcaaccaagaaatgtctatctcaaagcctgttgcttcttgaaagacctgcgtcataccccgtggggcagctcttagacacaggcaggcctctggggccttagcctggcactgctggcatgcccctcaggaaccagggaatcagggacaggcagtggtgactgtgcctatgaactatagggggccctgcagaggtcaggggctggcatgtttggtcgctgtggccatgctctcctggcccccagccccagtgcagccctgttctcatctgggtccctccttccccacaggggacctgttgatcatcatggcccagatcatcgttgccatccagatggtgctagaggagaagttcgtctacaaacacaatgtgcacccactgcgggcagttggcactgagggtgtgtgtgggcacaggggcctggaaggagtggggtagaagggagcctggggagctgagcacaggacaaggtgccagggttcacttgtggggggtgaacttcctgccccgccttgccttccagatgtgttttgacaagtcttctgacacctgctgtgtcaggaactagaggagaccaaggacagagatgaatgagatgcaagcccttcagaggaggtgaccagcaggaagaaagggcagtcagtgaattcaagtttggaccacttgtgctcaactgatgtctcattggccatgcctatctgagtctctcagggcagggagggtggcattcgagctgcaaatttcaacaggcagtagtaggagcagctccaaacagagcaaaggcacaggggactggatgtgaatttgaaaaccagtgaggaataattttgagtgtggccaggtgcggtggctcatacctgtaatcccagcacttttgagagaccaaagcgggtggatcacttgaggtcaggagtttgaaaccagcctgcccaacatggcaaaaccgtctctacaaaaaatacaaaaattagctgggcgtggtggcgcatgcctgtagtcccagctactcaggagactgagacaggagaatcgcctgaactgggggagcagaggctgcagcaagccgagattgcgccaccgcactccagcctgggcaacagaacgagactccatctcaaaaaataataatttgagtgcagtataggtttgatgttggggaaataatcaggaattaagtaggtcagggtcatgtcattagagaactttaccatcaggcaagtagatttagactttaaatgacggaggaatcactgaaagtttttgagcagggaagtaagtatcaaaattatgagattagcaagatacagctgcgctttcaaagaatgtcctgggggctagtgcctgttggggagcagctcttgtctggcccccggtgagctaagggacttaggcagaatgtgaattagctatatcactgagcatgcagtctatttccactcatttctgttttctagcaagaccttaatgagtgaagcagtgcatggacttaccttctggcgcaagctccttgtcacagaccagtaacacactgaactagaaagctgtgtttttccaaacttgtgaaaataatgtagtcagttgcagctggcagttctttttttaaatgaatagaatttttaaatatcagagcattgtatactgtaagggtaatgtttttatgagtgtgtgtgtgtgtgtgtgtccatgaacctgtgcacacgtgtactgggtcacaatataaaatgtatttcttactcttgatccagtcaaaaaaaccctgagtaaaagtggagaagggacagctagaacccatctaataggccacaagctcctgatgagagactgagggacgtgaaaggagggagctggcatgaggaccactgggagggaatgacccgagatcagaggaggctaagccggtgggctgtgctgggggtctgggggaaggtggagagtgtaactgtttcctctactccccaggcctctttggctttgtgatcctctccctgctgctggtgcccatgtactacatccccgccggctccttcagcggaaaccctcgtgggacactggaggatgcattggacgccttctgccaggtgggccagcagccgctcattgccgtggcactgctgggcaacatcagcagcattgccttcttcaacttcgcaggcatcagcgtcaccaaggaactgagcgccaccacccgcatggtgttggacagcttgcgcaccgttgtcatctgggcactgagcctggcactgggctgggaggccttccatgcactgcagatccttggcttcctcatactccttataggcactgccctctacaatgggctacaccgtccgctgctgggccgcctgtccaggggccggcccctggcagaggagagcgagcaggagagactgctgggtggcacccgcactcccatcaatgatgccagctgaggttccctggaggcttctactgccacccgggtgctccttctccctgagactgaggccacacaggctggtgggccccgaatgccctatccccaaggcctcaccctgtcccctccctgcagaacccccagggcagctgctgccacagaagataacaacacccaagtcctctttttctcactaccacctgcagggtggtgtta

SEQ ID NO: 1706 - protein, 407 aa, Homo sapiens
MAWTKYQLFLAGLMLVTGSINTLSAKWADNFMAEGCGGSKEHSFQHPFLQAVGMFLGEFSCLAAFYLLRCRAAGQSDSSVDPQQPFNPLLFLPPALCDMTGTSLMYVALNMTSASSFQMLRGAVIIFTGLFSVAFLGRRLVLSQWLGILATIAGLVVVGLADLLSKHDSQHKLSEVITGAARGRDTGLPYPALSSLGAQHRLIQALPCAIYQALGDLLIIMAQIIVAIQMVLEEKFVYKHNVHPLRAVGTEGLFGFVILSLLLVPMYYIPAGSFSGNPRGTLEDALDAFCQVGQQPLIAVALLGNISSIAFFNFAGISVTKELSATTRMVLDSLRTVVIWALSLALGWEAFHALQILGFLILLIGTALYNGLHRPLLGRLSRGRPLAEESEQERLLGGTRTPINDAS

SEQ ID NO: 1707 - DNA, 1311 bp, Homo sapiens
  source
  (1)..(1311)
  CDS (201)..(311)
  CDS (360)..(605)
  CDS (635)..(1111)
  modified_base (1)..(10): a, t, c, g, unknown or other
nnnnnnnnnncacggggtggcgggtcctgggagggagaagcccagacccagtggacactgacattgtctctcgctgttcccagccttttccaggcgtgtgacttaatccgtttccacagccagaccttttctccgtgagttcctcagccaggactgctgccatgccggtgactgttacccacccaaccgtcacgaccaccatgcggtcccccaccgtcgtagggtcctctagggccctgatccagcccctgggcctcctccgcctgctgcagctggtgtccacctgcgtggccttgtcactggtggccagcgtgggcgcctggaaggggcctatgggtaactggtccatgttcacctagtgtttctgctttgccatgaccctggtcatcctcctcgtggagctgggcggctcccaggcccgcttccccttgttttggcgcaacttccccatcacctttgcctgctatgcggccctcttgtgcctctcggcctccatcatctaccccaccacctacttgcagttcctgtcccacggccgttcccgcgaccacgccatcgccgccatcgtcttctctggcatcgcctgtgtggcttacgccaccgaagtaacctggacccggcccggcccggcgagatcactgactacatggcctccgagctggggctgctgaaggtgctggagaccttcgtggcctgcctcatcttcgtgttcatcaatagcccctacgtgtaccacaaccggccggccctggagtggtgggtggcggtgtacgccctctgcttcgtcctggcggccctcactatcctgctgagcctggggcactgcaccaacatgctgcccatccgcttccccagtttcctgttggggctggccttgctgtccgtcctcctctatgccactgcccttgtcctctggcccctctaccagttcaacgagaagtatggtgtccagccctggcagacgagagatgtgagctgcagcgacagaaacccctaccttgtgtgtatctgggaccgccgactggctgtgaccaacctgacggccgtcaacttgctggcctatgtgggcgacctggtgtactctgcccacctggtttttgtcaaggtctaagactcccaaagggccccgtttgcctctccaacctcttcatcctgcccccgctgagttttctttattgagtattcatttcctgggttttcctcttccctatctcccctcctccccttttctttccttcccaattcatcgcactttcccagttctctgatgtatgttcttccctttcctctgctgtttccttcttgttttgt

SEQ ID NO: 1708 - protein, 277 aa, Homo sapiens
MRSPTVVGSSRALIQPLGLLRLLQLVSTCVALSLVASCFCFAMTLVILLVELGGSQARFPLFWRNFPITFACYAALLCLSASIIYPTTYLQFLSHGRSRDHAIAAIVFSGIACVAYATEITDYMASELGLLKVLETFVACLIFVFINSPYVYHNRPALEWWVAVYALCFVLAALTILLSLGHCTNMLPIRFPSFLLGLALLSVLLYATALVLWPLYQFNEKYGVQPWQTRDVSCSDRNPYLVCIWDRRLAVTNLTAVNLLAYVGDLVYSAHLVFVKV

SEQ ID NO: 1709 - DNA, 25001 bp, Homo sapiens
  source
  (1)..(25001)
  CDS (201)..(292)
  CDS (1152)..(1437)
  CDS (3896)..(4096)
  CDS (8217)..(8330)
  CDS (9868)..(10029)
  CDS (10706)..(10950)
  CDS (12111)..(12183)
  CDS (15555)..(15623)
  CDS (16337)..(16474)
  CDS (18436)..(18602)
  CDS (24636)..(24801)
tgggtcaagatggaattccttagccacccagcgtcagcaggcctgggagtgagcaacgtagcagttcaggaagaagagagagggcagcaggcctccaaagcctgacttcctatgggtggccacatcccaggggagcctggccctgtgaatgaggagcaaaggaaggacagactgcagaacgggggagcagaagggtccacatggaaaggagagacgggcaacagtggttccttgaaactctccctgtagaccgtcatgtgatccacatgcagttagggacactgaggccagggtagggaagtacccagcaaggaatgcagagagagccgctgagagcagcacctttgggttcccgattctgcttcaggacctggactttggtttaactttcctcaacttgcatttggcagattagaaaagataccaaagcaacaagttatttcaggcctagctgacctttaataaaaagcacatatgggctgggtgcagtgactcatgcctgtaatcccagcactttgggaggctgagataggcagatcacttgaggtcaggagttcaagaccagcctggccaacatggtgaaaccttatctctactaaaaatacaaaaaattaaccaggcatggtggcacacatctgtagtcccagctactcgggagggtgagacacgagaatcacttgaacctgggaggtagagattgcagtgagctaagatcacgccactgcactccagcctgggcaaaaaaagaggctggaagggaagggacgtatctgtggaggtgaacagggcagggaagttcatggtgtagagctgggaagtttataggctctgggccagcctttctgggatgggatcatggctccgagtatgaactgtgtgaccttggatgaattacataacctctctgggcctcagttacctcatctgtaaagtgggcatacttggtgaagatctgggaattaaacaaatgaatatatgtaaaggcttggcatagggcatggcatagagtaagttctttgaacatttttaagtctaaaagcccagtggccggtgaagattcacaaggcacgttatcctccagtttgtcttagcactttgtcttggctccagattccttatttcagtttttaaaaccagctgttcgtggtcaggcaggtgctgtcctggcccagctggtctgtcagagctgtggcccaggctctgtcccaccagcccttccctaactggggcaaagtgaggaaggtggagagggagctgccctcacaatggaagccaggccttggctctaaggaactggaaggagatgggaaggggttgggaatgcagctcccagccccacagctgctgaccctgccccgtgtcatgtgctcatccacagtgaatacaaccgtgttcaatgcttcagccccattggcaccagacaccaacgcttctctggtaagtcctttcctcttatgttagacatttgagtgcttttgtttgtaggaggagggagaaaagattttggaaatgagaccaacttatggcctcccagacttgcagaggtcaactccagctgcacgtcagggtcacctgcagagctttgtaaatgaacacttttttcttaggtatatactgtaaacatcccacttaaaaacatgcctcattctgttaaatccatgtttttttgtgcgttttttttttttttttgagacagggtctcactgtgttgcccaggctggagagcagtggcgtgatcttggctcaccgcaacctccatctcccaggttcaagcaattctcctgccacagcctcctgagtagctgggattacaggcacgcaccatcacgcccagctaattttttgtatttttagtagagacggggtttcaccatgttggccaagctggttttgaactcctgacttcaagtgatctgccggcctcggcctcccaaagtgctgggattacaggcgtgagccaccgcgcctggccccctcatgtgtattaataatatgatacgagctgggtgtagtggtacacacctgtaatcccagctactcaagaggctgaggcacaagaattgtttgaacccaggaggcagaggttgtggtgagccaagatcgcaccactgcactccagcctcggtgacagagcgagaccctgtctcaataataataataataataataataataataatatgacacgcacacaaaggaaggggaagtagagatgagggatggtaaatagagcctcacaaagctgtaagcaaagcctgccattcatttttctgccttcttccttctctttctgcctaggacccccaatttctagcagtgccactctccagccccagagagtttattagtgtttcttcctcaatgaatctaatgtgtcctttgcacaccttagtctctggggcctaaggtatggtctgcctttcccagtaatgacagtggtcttcaggagccagcatcccagcctaagtggcttaatgatagaagttcaattccagatgaaggtagcacctggtaggacttgggggacatttgtgagcttttactgtctccaaggttgcttcttaagttattcctgcctaggcaattgactgctctgcctacacacatcctagttggcaatttaacttaatatttttcaaagattagggtttttttttttttgagatggggtcttgctctgttacccaggctggaatgtagtggtgtgatcgtatcatcactgcagcctcaaattcctgagctcaagtgatcttcctgcctcagcctctcgagtagctgggactacaggcatcagccactgtgcctggctaatttttaagttttttgtagagacaaggtctcactatgttgcccaggctggccaagtatcaaattttgagagagaaagaacagaatcagtcagtgcctatttctgaatccctattatatgcaaggggccatgtgcactgaaggctaaaaaagacatctaagaaaccaacacagaacctgtcctcaaatttgtttttaatatatttgtagagaagaacctgaaaagttatgggacagcataagcagaatgtaccatgcattaaatataggccaaatgtgtacatcaatcttgaaggcaggaaaggaggctgctggagaggccaagaaaagcctcaaagaggaagtagaatgcgatctggtcttcaaggttgggaaaaagttggctcagcagagaaaagcacattccagactgaaggaacagcatagacagaagggcaagagaggaaaagcacaaaacctgtgcagaggctattgggtgggctaggccagctaagatggggtgagggtggggcttggaacactgtctcacagtacacatcagagtgtgtctcacagtacacatttatatatatatatatataaatttatatatgtatatataaataaatttatatataaaaattcactgttgtgtatgccttggattttaggcatctgagacaccaaggtggggaatggctgaaatgacccaagaggggactgacaagggaggtgatcccccatatatgaaagggtgtgacagaggggatggaggggagagaataaagatgagacactccaggaaggaggcgtccacaggacctgtggttggttgatgggagccaggcatcctgcctctgcacttttcctacttgctagcacagcagtgcatcctagaacacaatgaagaaacacatgtgagctcctaatcttcctagggagcttgtcattccttgaaccagcccgtccccaggaacatcactctggggggctggggtccctcagagggtgggaaggtatgctggctgcctggggactgcagtgggaaggacacagctgactcatcaggaagatgctgacccattctctcctgtgcttggtctccaagtacaacctccttaacctcacagcgttggactggtccctgctgagcaagaaggagtgtctgagctacggcgggcgcctgcttgggaattcctgcaagtttatcccagacctggcgctcatgtccttcatccttttctttgggacatactccatgaccctgaccctgaagaagttcaaattcagccgctattttcctaccaaggtaagctcaccctgcagttaggaggggacctgcagtcagacagctgctgagtcccccagagagggttctggtccaccgacaggatggactccatgcgagcactggcccactggggtttttcaagttaagtcagagagaactgtgttcccttgttggctggtccccttgacaacacttggtattgtcaggcttttatctttagtctttgtctatagtagtatctcattgtgttttttaaatttttcatttccctgatgactaatgaagttgaaaatacagctattcctgtgtttattggccacatgcccaattgcctttctttttggaagtgtctgttgaaatctcttgcacattttgggttgtctgcctttctgatttgcaagagtttgttatatattctgggtagaaatgtttttgtgattatatgtgttgcaaaatcttctcccactctgtgactgtttttttctttttacatccttaatggcatcttttgattaacagaaattcttagttttattgtaattgaatatatcaaactttcctcaaggcaaatattggacagcagatattcttgtatgttaccttctaaaagcttcattgtttttcctttcatgttagatctacaatccatcagaattgattctgatgtgtactgtgagacagtgtttctttgtgattttatatagtcaattgttccagtattttttaaagactattctttctccattgctttgcaatacttcctttgccatatatcaaatattcctatatgacagggtctgtttctgggttctttattctgtttcactagtttatttatatatcagtatcacagtcttcatttctgtagcttataagtctttatatctttgtctcccaagctctccccttttgtcctttttatataatattttcttggccctttgcatttccacatgaattttagaatcatcttaaatttcaccaaaatgaaaacttgttggaattttgatgggattatctttgcctctgtttgggaagaattaacgtctttcaaattttgagtttttctgatttatgaatacagtatacttcatttattttggtcttctttctctccataatgttttatacattttgatctttaagtcttgaacattttttgttagagttattcctaggtacttgatttttttataccgtcgtaaatgctaactgctatgttattattattttattattattattatttttgagacagagtctcactctgtcacccaggtgggagtgaaatggcatgatctcggctcactgcaacctccgcctcccgggttcaagtgattctcctgcctcagcctcccaaatagctgggactacaggcgcctgccaccacacccggctaatttttgtaattttagttgagacggggtttcaccatgctggccaggctggtcttgaactccttacctcaggtgatccccccacctcagcctcccaaagtgctgggattacaggtgtgagccaccgcacccagccctaactgctgttttaaattttattttctacctgtttgtggctggaataaaagatttatgaaaacagcacttgcatacataagcagtaactgtgccgtggggtggggggtactcggaagaatttaagcaactctttcccaccgtaaactccattagcagtctcctaaagccatcttaactaagtattacagctgctactgctactaatcataatgataaaatctttgaaataaatagttgaatttttcccagattttctaaagactaaataaaaggtgctttaggaagcttcacagtatataaactgagtaaaaaaatagtttgcttacaacacaaatgcaccatcaagacaagttctcttccttcctgcccacttccagtccagagcacatccctcaatctcctcttatgtaaaaattctcaagcagtcactgtatctgagagtatctatctgttgcctacaggatgaaaagtaattcatgtggcatgaaattcttgtgccaacaacattttttccgtcacattacttaaaaattgctcagttgggccaggcacagtggctcacgcctgtaatcccagcactttgggaggcccaggcaggcggatcacgaaggcaggagatcgagaccatcctggctaacatggtgaatccccgtctctactaaaaatacaaaaaattggccgggcgttgtggtgggcgcctgtagtcccagctacttgggaggctgaggcaggagaatggcatgaacccgggaggcagagcttgccgtgagcaaagattgcgccactgcactccagcctgggcgacagagagagactctgtctcaaaaaaaaaaaaaaaaattgctcagttgccttctggaatttccggttgcagagaggaatgaggccacaccattttatactcatcagattggtagacagatgaaggtcttgggacaccagatgttggagatggaaagcagtaggtgggaatgtagacagatacatccaatttggagagcaactgacactctctgattaggttggaccatatgaagttgcccatatttgactgtttcaacctacaaaaaaagtcaagttcatgtggtttaacttaataagcattcatatggttttgatgtatatgctaggaatattatagaaaaggaagtataaacccagcacactacttggttctgctgtgactaatatttatatgatcatgataatataaagctgttactaattttcaacttttggaattgacttacagataaaacacacaagccatgtgtttacggaacaagaaatgattgttctcagcttcgacaatggaaaggtcaaagtggaggtgtgacaggaaggaagaggggaggaggagagaggtggtaggaggatagaggcagtggtcctcaccttgcaagatggagaatgagagatattagccaaagctaatggaaggagatgtttaattattatcacttgaaagtacaaaggaaacccataggagcttaaaattaactatcaaagattaggaataaggaaaggacaggaggcacagtgtaagtaaaggtaaattcttatcaatagataatcccttaaattagtaaatgaaaatattaaagtatatgcatattagttaatgacatggagggaacctctggaacaagtaaaatcaagcagacatagtggatagatctggaaggcggggctggattgagaaaaggggaggtgggagactttgcttttcctcataagtattttccactatgtgggtttttaaccaattacatatgttatgttaataacaaatttaaagagaaaagggggatgcagggaatgaagtcaatgtactgtcacctgcccctgcccttcaaattgccttctttgaaaagatattaaaaaggccacagggtagacgttgggggaccatctgtcctgagacttctggacatagagttggtttggaggggaggtcggaggacattgattcagaatgggcaggaaggtcaggttcagaacttggtctaggaagggcctccaggttcagaacctggcctaggaagggcctcttgagaaacagcggaacaagagactcttggtggacaaaaggtctgagtgtagccaatgatccccagtggaattggggagcctccctcctagcccaggtggggtacaacaacctgtcacaggcttgtaggaactaaggtttgcttcagagtccagcccttgccctcatcatacctgctgggtgccccagttcagactgtcataccagaacacatcttcagcagtggctgccatggccatatggatcataacagatcccacattgaccaccatatgccaagcactctaaatgtgtcacagttcacttacacctttgagggagatactaccatcatctccattttacagagaaggaaattgagtcttggagagatgacacgcttccccaagctcacacagttagcaaggagcagagcctggatttgagcctagttctgctgccttcagagcccagactgtaatagttcacctctttgctgccggaggactggggctgcctggagctgggtgggtgctttactcacttcttttacttgctcatctcctgtctgcaggtccgggccctggtggctgacttttccattgttttctccatcctgatgttctgtggaatcgatgcctgttttggcctagaaactcccaagctgcatgtgcccagtgtcatcaaggtttgcccctttccctcgctctgggcatccagtctgcctgcctaccagctgcagattctttcccctctgtgctgatcaaactctcttctcctcttggccaagagaccattttagttctctgtgtgccacctttcctgaacacaggctcccaggagccagtcctttgaggtagggcggggaggggtaacatattcaccaggaaatcctgatctatagtcacgaggtgaggaaggcactggaattcaccctccaacccagcagaagcctcttgattcctatttgagtgtctccagttccctgacctctagcaatctataagctgggccaaatgggatccattgaaactgatcccttagaacagtgattctcaaagtgtggtcctcagaccaatatcatggcatcacagtcacagggaactcgttggaaatgcaatttctcggccccacctgtggaatcagaaaagctggggggtgggaccagcaatctgcattttaacaagcccttcaggtgacttggagtatgctcaagtttgagaaccactgcttagaaattacccactagttagaactggtgacatatgcttgtagctaaacccagccctactccctcataagagcaccaaccggccaggtgcggtggctcacgcctataatcccagaactttgggaggccgaggtgggcggatcatgaggtgaggagattgagaccatcttgggtaacggtgaaaccccatctctactacagatactaaaaaattagccgggcgtggtggcgggcgcttgtagtcccagctactcgggaggctgaggcaggagaatggcgtgaatccgggaggcagagcttgcagtgagcggagatcacgccactgcactgcagcctgggtaacataacaagactctgtctcaaaaacaaaaaaaaaaagaaagaaagaaagaaaaaaaaaagagcaccaacgatctcaccagagtagggagtccagattctagaacttaccctccctgtctttaaggttttttttgttgttgtttgtttgtttgttttttgagacaaagtctttttatatattctcctcattctgaacatgcaggactgaactgatgttcagcattttacagacaattctataatgctcccagacaggtgactcaggagaggcagaagcagctggccctgggcccacccatttctttattcttttctgctgggcctcattcctgctgtttgttatttgcagcaggtgactgtgctctctctcctggctgccctctgaccttcacctccatgtttcctgacaaaccccagggctgttgcagcaaattaccttcttagttttacagacactgtctgcatgcatgctccttcccatgtctgaatttagtctaaagttgcagctacctaaggtgtttaagggaaaagattgcacttgaaaagtacccaaagtcagggaaagttgaggaggtgggacagcaggccaggcgacaagtgccctgggacaagggagagaggaaagggcccctctctgtttgctcccactcagccaacgcggcctgaccgaggctggttcgtggccccctttgggaagaacccgtggtgggtatacccagcaagcatcctgcccgccctgctggtgaccatcctgatcttcatggaccagcagatcactgccgtcattgtcaaccggaaggagaacaaactgaaggtaaggccggtactaggagcagaggcataacctctttcttcccacaaagtcagaaagagcgaaggaaggacatgatgcttctttcagtactttgggccaggaaaatatgaggacagagactagagttcccacttggtgtgttgagggggaaatgtgacctccagatgtgggtaaggccaccagggctggagtgactttctgaggaccaggaccaaactaggctgggccactgggcacaggctctctgtctttcccaaagtgacctcgagttcttatgagaatcagcagatcctgacaggggctcagcctagaacactgaggcagaggaacttccttagccttcctggtctctgcaactccccacccagcctgtgagcctgagaagactcgggtcaccccctcccccatccaggtctggaccactttaggtgtggcctgtcccagctggggcccctcaggaaccgcaaagaccctgtggccaccttctgggcccttctccccagagacccaaacccagggcctctccaagcttgaacatccctctcttctatgacccataccccttaggcagttcaccctttcagaacacacccacctgtgcaatccttgcaaggagcacctcaggccccttcagtatcttctggaaggcagggggtccttgaaccatgttccacagaatggttgcatccaggaggaactggctccccagaaacttctccctcccccaaccccgctcctgcagaaggctgccggctaccatctggacctgttctgggtgggcatcctcatggctttgtgctcctttatggggctcccctggtacgtggctgccacggtcatctccatcgcccacatcgacagcctcaagatggagacagagaccagtgcccctggggagcagccccagtttctgggagtcaggtaggaggggtcagggcctagggatcacccaatggggaggggcccactcggggaggagaagctggctttgcctgccacaaaaggatttggacaaaaagggcccccgctctgacggcccaagaaccacagggacaggagtgctatccctggagggagggaaggagagagacagaagtccagctctaagtggggctttttacctactgggctccaagcagtatgcataccccatccataaatatgcacacgtgccagacactcatcttcatcagccacccaaggtccccacaaggcttcgtgctgtcctgcccttttcctcttcctcaagaccctccaggcccctactgccctgatggccctcctgcgggttcaggtcctgctcagtctctattcctccagaaggctgtcctgggatcacccccgctccccagtctgtggccctgcctgttactcctgttccttcacttgcctcttctctcacgccccatggtaggcagagaagtacatcttcagccccttagggcctccagggcgagaccacaccaaaccctggctttctcctacgtggctgccctaagaacttctcccactatcttgagatacttggaccgcccagcctgcccgaatgaggcttctctgcccgactgcagggctcacctgcctcccacccctgacacctgctctgctggtgtcctcttccccagatcctcattcattgtgccccacaaaaacgaaatcttaaaatcaaagggcagagtaatagcattttatctcgcatgtatcctcacaataggtgccattattatctgcatatactgaggctcaagatgggcaggctcctgcccaatgccacataactagcaagtggcagagccaggatccagtccacatcagtcctgctcaagccccccagctacaagccactacactaagcggcctccctcaatgctcctgcaagatgcccttgccccagtcaggggccgcctgtcttcccacatatggttcagctgggcctcaggcaaccaggcagagcttcatgcagaagccctcaaggccatggccttggacacaagcttcaggtgcccacagaggggcaggagggccagagtagttgccaggcatttcctggtacaccctgaccatgtgttcttctctgccagggaacagagagtaaccggcatcatcgtcttcatcctgacgggaatctctgtcttcctggctcccatcctaaaggtgaggtcctgcactgtcacctagggcctcgttgcctgagaaagcagagcggatgccttaggcagggagggggtccccacatggctagggatcactggcctatcagccccctaagaaaggcacagtcttagccgggcatggtggctcacacctataatcccagcactttgggaggccgaggcaggcggatcacctgaggtcaggagttcaagaccagcctgaccaacatggtgaaaccctgtctctactaaaaatacaaaacttaaccaggcatggtggcacgtgcctgtaatcacagctactcgggaggctgagacaggagaatggcttgaacccgggaggtggaggttgcagtgagccaagatcgcaccactgcactccagcctgggcagcaagagcgaaactccgtctcaaaacaaaaaaaagaaagaaaagaaaaagaaaggcacagtcttactaggccaaagcaatgtttccacactgtcaccgccgttttctgtgatactgcagttttttatcatcaccaatcctctctcccacccatcccagggccactctcacctttctggaggatactcttccctctgaaagttctgccaagttgtagccctgcttagatcaggaacttcctgaatggggtgtgtttccacattgccagggtttggggctcatgaagtttaaaacttgcagcaggaggccaaacatggtggtacatccctgtagtccggctactcaggaggctgaggcgggaggatcacctgagctcaggaagtctggggactcgagtgactttttcccacacagcttgaagctcctcttgcttatgtcccaccacaacagctaagagactaagtcaagtaggggtacaatggaggcaggcgtcccccacaagggtctctttctggagagactccagaaagcaaggtgttcccaccaggcttccctgctctccactccagccaatcgcccatcactctccctttcccttgatcagtgcccacgtaagactttcctttcttgaattaagtttacctgtaattgcctcaaccttttgccgatattatttttcctctttgaatatctcaaaacagctcatgaccaggcatggtggctcatgcctgtaatcccaggactttgggaggccgaggtgggaggatcacttgagaccagcctgggcaacatagcaagacccccatctctacaaaaaatacaaaaattagccaggcacgatggtacatgtgaggcatgatcacttgagtccaggaggtcgaggctgcagtgagccatgatcatgccactgcactccagcctgggcaacagagtgagacctcttctcaaaaaaaaaaaaaaaaaacctcattcagaggtgaccttgtaagaaacaaacgctaaagaatgatgattctggctgatgtatttacaatggaaaatatttctggcttgagaattggtgctgggcatacccgagcagtaagtaggaggctggcattttttaagggatatttcccttgtgggggaaacaaattacacacaggagggcaagcattttgtttattgaaaaatatattttaaatggccagggactacttacttttgtagagagggttctaaggtgccattgtgtatgtcaattttgacactgtttaacatacaagtatttgcattaaaaagctcgaatcaggctgggtgtggtggctcaagcctgtaatcccagcactttgggaggccgaggcaggtggatcacctaaggtcaggagttcaagaccagcctggccaacatggtgaaacccgaaaccctgtgtctactaaaaatacaaaaatagccaggtatggtggcacatgcctgtagtcccagctactcaggaggctgagacgggagaattggttgagcccgggaggtggaggctgcagtgagccgagattgcaccactgcactccagcctgggcaagacagagtgagactccgtgccccccccaaaaaaaaaaaacaccttcgaatcggccaggcatggtggcccatgtctgtaatcctaacactttgggaggccgaggtgggaggatcacttgagaacaatagtttgagaccagaatggccaacatatcgagactctgtctcaagaaaaaaaaaaaaaaaaaaaaaaaagctcaaatctaagaacagacttctttaggggcaaaaaattcctctaaagccctcctagtgttggcatagtgctctgtgctctccggagtgctctaacatgaccacaaggaggaacagcctctgctcaccatggggagccacagctgcaggtgaaagagagaaggtaaggggcagaaacagctgagagagacagcggaagaatgctttgaaaggctgtgaagatttggaatcattcttgtagagtgggatgaattctatgatcccatttttgaaaaagcaaacaaattgcctgtgtgcaagtttggagggaaggatacccgccaaactattggtggttagttggtgatgagtgctgattagtttacacacttttgttctgcttcttttgtatgtgattgcgtatgaggcatgatttctgtttttttttggtttttttggtggggccgggggggtttgtttgtttgctttgtttggtttttttgagacagagtctctttcgcccaggctggagttcagtagcacgatctcagctcaccgcaacctccatctcccggattcaagcgattcttctgcctcagcatcctgagttgctgggattacaggcatgtgccaccacgcctggctaatttttttgtatttttagtagagacggggtttcaccatgttggccaggctggtctcaaactcctgacctcaggtcatccacctgccttggcctcccaaagtgctaggactacaggtgtgagccaccacacccggccggatgcgtgatttctgttaagtgtcccgggtactcgctgctgatgtagatcagctcattaaaagtccccatgcccctgcaggctgagcagttttaggggaccctcagctgaggctggaggtaggaagaagctgggcaggaatgaggagggggcagtctgtggagtcttctcactttccagaaggcatttctttagccagaccacatggcctccgcacggtgcagtgaggggccaggccaggagagcagctgcatgctgggccagctaccccagccagagaaggggcagtacagccccagtgaccctcatcttcacccctgcccacatcccagttctgctgactctctgttcccccaaatatccagtttcctagctgcctctgtggtcaggagccactgtcatccagaacagggtggccaagggccgccccaggcagaggccgatccaaagctctgctctcattttagtgtatccccctgccggtgctgtacggagtcttcctctacatgggcgtggcctccctgaatggcatccaggtaaggctttccctccagatcccttcatgatctggagtcaacattccatgtctggttccatgtcaccaagacccccaattcagttgtcccaattgtccccaattgtcctaattcaatgaaagaataatagtaataatgatactaccacttactgatgctatcaggcaaaataaatatgttaggcacttcataggcctcatataattgaatctatgtaattaggtcctctgatccccattttacagatggggaccggagggtcagaattcaaaatccagaagaagctgactccagtgagcatttcactgtacctctctctcttccctaaggcagctatgcagaagaaaacatttttgttttgttctgtatttactgtgaaatcccagaattcttaaacagtttgtgttacaattaacttgcactttccctgaatatggacaatgtccattttgtggccagctccagggctcctcccctcacccagggctcaggaccctttctctaagaccccattatgcatccgcctagacacctccagcccccctcccgtgcatccttaaggcctgagcagggggcttcccctctctgagaccccacccaggcaccccttcccctagtcccaggacccagcgggccctcggggtctggctgcctggctgagcccccgctgtccccctagttctgggaacgctgcaagctcttcctgatgccagccaagcaccagccggaccatgccttcctgcggcacgtgcgtgcgccggatccacctcttcaccctggtgcagatcctctgcctggcggtgctctggatcctcaaatccacggtggctgccatcatcttcccggtcatggtaaagtgggcacgggcttccccctcctgcctggcaggttggcctgggcaacccagaggtgcagcgcaacctcccctcctgccaccttctgccttcctgtcagctgtggcctggctccctcgggtcacggaggctggcacagaatgacctgatttgagttgtgagtccaggccagatggtgtggggtggggcagagaggaggcggaggaaggaatgtcagagccgctcagtgagaacccaggagccaccctacctcctggctccagggagggacggagaaagaaaatcagttcaaccaggagaccgagttcccactgccaaaattccaaccagtctcagaagtcgatgcgtactaaatatagatctttccaccattcaagatagctaaatttaaaaagctaaatagtgaagtaggggggcaggggaagaacgagggtcagagatcaagaacaacaaaacccaatgatggtatatataaagcttgagcaagggaaaggttacaggtctttcactattcttgcaaatattgtataagtttgaaattactccaaaataagaagtgaaaagaatgcaaagccaacaacatgttgcatctggccccctagataactcaccgagggcagtgacccaggcccttgccaggagcctggagtgtgtcagcaaatgcctggggaaagcctgagggctctggggtaggggacaaagtaaggacactgaggagaacttgaagtgcacactgctgggaggggtctagtccatggttcttgacccgggctgcccatgaaaatcaacccagatcaacaaatcagaatctctagggaaacccagactttggtatttttatgaggtccacaggtgagcatagacctgcagccagggttgagaacccccactgcagggaaagggagatagatcctccccccagtgccctcaggggcctcagagctggcgaagggaaaggcagtagtagtcatgattagcatttactgagtactgttccactgagtccacaccagcccccaaagcactaataaccccgctttacagatgagaaaatgaggctcagagagcatgagcagagtgaccctggacacacagccagatagggcagggcaagacccacaccctccacctattgatttttttgtttaatttgcatacagtaaaattcaatgtgtgggtctatgagttttggcaaatgtacagagtggttagagacataaattctcaggcattacctgacctgctaaatcagaaactgggggaatccagtgatttgtgtattaattaacaagccctccaggtcctggtgcatgctcaagtttgagagccactaatttatgtatttattttatttgtttgagatggagtcttgctctgtcgcccaggatggaatgcagtggcacaatcttggctcactgcaacctccgcctcccggtttctagcgattcttctgcctcagtctcctgagcagctgggactacaggcacccaccaccatgcctggctaacttttgtacttttagtagggacagggtttcaccatgttggccaggctggtcttaaactcctgacctcaggcgatctgcccacctcggcctcccaaagtgctgggattacaggtgtgagccaccacgcctggctgagaaccactaatttaaagaataactgtagttctccagcccatggcctttctgaggctccccacttcggctgtcacaggctccgtccctcttggtcactggtaggcatggtcactcacctgaggggccagacaagaggaactacggtggagggaaagtgaataatggcttatgggagcttcgagacggctccaaagacaccacaaaaagtccctgaactcagccgactgagggagaaaaaaatctatgcctgagtttgggcattgagaccacagttttctccaaattctcacaaaactttagtctctctccaccacagatcctgggcctcatcatcgttcgaaggcttctggatttcatcttttcccagcacgacctggcctggattgacaacatcctcccagagaaggaaaaaaaggagacagacaagaagaggaagagaaaaaaaggggcccacgaggactgtgatgaggaggtggggaagatgtgaggccggggcacagaggagaaattgagagaccttctctccacttttgccagggacagggagagggcggcttcttgggtggcctgcagcagtgcctcggcccagtccaggatgggctggggcatctgcttgtcttggtctggggtgttgagggctcttctgtttatgtgaatatcctcagggtgggccagagtgaatgagactccctgtccagggaaaaggtgactggccatgcccactctttccatcactgtgggctttacggccgtgatcacagcaagcgggttcctgtgggaagggccaggaggcagctccagcatggaaggaggttatgaagactgacctccaaagagtggagcagacttggggagaggtgtctaatggggccttataagtagactggactccagacaggcaggaggggctgggaacaagttttgcttgcgcctttgcctagggtattgaggacaaagatggggaaagaggcaggtatcctcgccaaaaggagactggctacatttcccagatgtctgggacaacatggttgccccatctgcccctcttctcccatggtcccttcccatttcatccccaaaacactcagggagtcaacagacaaggggccagtccagaaattatagtgaatcacaaaacatgaggcagaaagattcttaattcatgtgttcattacttatgatgaaactgtccccacaaaaggaagtgacttacccaaaatggacatgtagctacatttctaagaaggaattaagaaaataattcctgactttgctggtttctgatatgctaagctgcctgtgccatctcctaatgctgtgcttggttcccaatctcccaatttgacccaaactcacgtccctgcatccaccctgtcctgttctcgtgattttgccttgtgcagatgaaacctgttcaaggcaaatcccttctgactggctggtggtgattaaaccatcttctgatcagtcagaactcccctggtccttaattactgtgctcttccaggaagagtcccataatgcatgtgtttgtagatgatttgtaaaggtgggttctgaaaacaaagaaacagagactaagtgccttttaaagacaaatacttcttttgttgatactttcaataaatatctgagtggctaccacatgccaagaactattacagggttgggaaaaagaatctctgaattatgatatatcaatggaaaaacaggattcaatttatacaaattcattttacttgtcttatagcaacacagttgttgtgtgaggttcattcccaagtgactggttgctgtgacagataaaactgttttgatgagtaacattcctggaagagttccggtctgtctgatggtgtgtataggacagcaggctaactgtgcccattccccttcagtggaccccagggtatttgcagcatcccctaactgtttagaggtgaacagaatggtggtttgcaatgttcatgcatgcattttccatcttggcaagaaagccaagttgttggccacgcgcggtggctcacatctgtaatcccagcactttgggaggccgaggcaggggggatcacaaggtcaggagttcaagaccagcctggccagcatggtgaaaccccatctctactaaaaatacaaaaaattagccaggtatgggggtgcacgcctgtaatcccagctacttgggaggctgaggcaggagaatcacttgaacccaggaggcagaggttacagtgagccgagatcgcaccactgcactccagcctgggcagtagagcgagactctgtctcaaaaaaaaaaaaaaagaaagccaaattgttgtgttggtgtttatcctcttttcccactgtttttctccagccccagttccctcctccctcggttataaagattcccatggaaagtgtccaatcagatccccaaaacggtatccactgcattgccagtaagtaaaacacatgatgtctctcccttcttactactagtcctccatgtctttcccctaggaactttcatctgtaactcagggggatctaatcattttggatgctagagcagcagtccccaacttttttgtcataagggacaagttttgtgcaagatagtttttccacggaccagtagggagtggggaatggttttgggatgagactgttccacctcagattctcttaaggaatacgcaacctagatcctgcatatggacagttcacaatagggttctcacccttatgagaatctattgctgccactgatcccaccggagctggagcacaggggttaatgcttgctcgcccatgctcacctcctgctgtgcggcctggttctgctactgttccatggcctgggagctgaggacccctgcgctagaagacctttgtccttggcagagatcaaagagaactgggccaccaggactggtactccaaccagatggaaaccccagagcaaagcctgcagactcgactaattctcactttagttgaggcaaaatccctcattccctcctttccccaggtgtccccagatccctgtggcatctcctggccctcttctatgttgtttcagaccacatcagtccaaacatggccaccaggcctcccatgttttcagtgctgttgaaaatgttgagggctcagaaccaagcttttccctttagagaaataggtagcatagcacttgggttataagtcaggcataattggaggtcctcgtggtggttgtgctgtgcctctgtgtgaatcctcagcaccttctcagcagacagctgagagggaggctgcctaggagggactgggcattgcttatggaaatcctgggagattatattactgcctttaacccctcccagcctcagctccctataggtggccagtcctgtcatccaggcaacatagcctgtcccgaggtcttctgaaagatccctaccttagtcccgagccccgtgcttctaatacagggcttgccaccctcaaagacagattaggggtgggtagccagggcatccttcccatcagcactgtccatcataggtacctcaagatcttgagtttctcagactcctcccccactcctatttctctcttccctggccctcccatgcctcacaccccctagccctggctgagcaccttctgggtgaaggagtaactaagcccgaagccacacatctctgaggccccgtattcctcttgcatagtgttggctctagggttagagaaggaaaagaaaggaaatggtgggggaagcccggagaaatatggtgctcaaacctgctccacatctgacatttttcattttcctgccaggaaaaagatcttccagttggagttactcactctgattcttccttcagtgacacagaacttgaccgaaggtaaacactgttaggtagactccttgcgtattaggtaagagactaggaaatggccgggaaggtggagggtctaggatttcccaagctagctgtcctctcagtagaaggcccttgctggcccccaactgggagtcaaaggctgacaaacctgactcatcattcagggccaagaaacaagtatgtcttcttactgacttaacaacatggttacaacacacaaaggtattcaactttagtaaaggaaattcttataaaagattaggtagaacaaaaattgaaagtaaacgttgtggcccagcacggtgcctcacacctgtaatcccagcactttcggaggccaaggcgggtggatcacgaggtcaggagatcgagaccatcctggctaacatggtgaaaccccgtctctactaaaaaaatacaaaaaaattagctgggcatggtggtgggggcctgtagtcccagctactagggaggctgaggcaggggaatggcatgaacccaggaggcagagcttgcagtaagccgagatcgcgccactgcactccagcctgggcaacagagtgagactccatctcaaaaaaaaaaaaaaaaagaaaggaaatattgacagaaaacagaagccaggcgcggtggctcacgcctgtagtcccagcactttgggaggctgaggcgggcagatcacaaggtcaggagatggagaccatcctggctaacatggtgaaaccctgtctctactaaaaatacaaaaaattagccgggcatggtggtgggcgcctgtagtcccagctactcgggaggctgaggcaggagaatggcgtgaacctgggaggcggagcttgcagtgagccgagatcacgccactgcactccagcctgggcaacagagcaagactccatctcaaaaaaagaaaaaaaaagaaaacagaaaaactaggcatggcttaagtgtaatatcactgaaagccaggataaatgaacgctaaggatcgaaaccctggggtactctgtagaatgaattaacagcagggttaattagcaaaggtcagaaagggtatggaggaaagccaacatcagagatcaacatcaaagctaacatcagagatcaactggagatgggaactgttaagaataggttcaaggccagttgccaggagcccccatgccaacaatgtgattgttcttcatgagaagccacccgtgaaaaaggtgagactccctgatgatgacatagtgggggcaaacacagaaaagatgaatttagaggcaagaaaggctttacttcattgttacttgggaagatgccaggggcagtcccactcctaccttgtgccctagaatggacagggatcaaacagtaattacagcacaggctatcccaagtctagaagatcaatctccaggcacagagggcactcatccaagagatttttggggaaacggggcaggggatcttctgaattataaggcaaagctgctatcccaatgccagggtgaaacgacacacttttccccagttcaaccctccctaagcagcagtcccaaagatgctctagcccaaagtgtcacctgtcccagttaatctccaccttccttctcatcccacttccccagtcaggctcctatatatgtgatgccattgatctttatacattagtatacaccggtattatgagaaaagcagtctatcttattttcatttataaaataatctacatgaaattgactgactactcccaatttcaggcagtagagagaaaatttggaccaggttaggggtttccaaaaccctgttaaattacacaaggccctaagacagggtcagaaatgaagaaactttggtaactggagatggtatctcccaacctcattggtgttttactgaatttatgaaaacagatggaggcaaagatcactaaatagcaagattctgtttcagtgaaaggctctgcaacatgatctggtttaacaaagactaagcatcaatgatctaccaggtgcgatgcttaatccctgaggatgtggaaagaaaggcatgcaaacaaagacagagcaccctgtgcaagaatatcggagtacacagggagggagtagcctcgttttgagaatctaagaaagggaaactggaatctgccagacatagagcggggcagagaaaagaaaaggcatttcaggcagtggacacaggcccgaagtaccatttgaaaacacacacaaacacacacacacacacacacacacacacacacacacacacacacctccaaagagcaaagaacactgcaatggatggggcaaactaagcaggcaggactacaaacacagaagactgtgtttgtgtttgtgagaagacaagacactcctgtcttctcacactaaggagcttagattctttgaacccaatgaggaatcaccaaatttgtgatttcaaaagttcaccttggcagcaatgtgaagataggtttacagggtgagaccagatgcgtgactatggctgaaggccaagccaataggaaactgctcattctggcatgtgctgagagttcagaagcaaagatggaagtatttgcattagagccctgctctaggggatgggttcaaaacaccaagaactacgtaatccttctttcctacttctcgttcagcatcaccttgcacttcaaaatatcctgtccagcttcacctgctttcagctactcacggaacccagtgttcatggtgccacaggtgaagatagagatggagtcagactatgacttcacagacatggataaataccgaagagaaactgacagtgagaccaccctctaggatgaagcagcttctcccagatgggagatggagagcctggcttagtcttcactgggagggtcttaacttctctgtgcctgtttccttctttatcaaacagagggagtccgtctgcctatagaaaactggagatctattgatgaaaagtattgcttagatgcaaagctctcccctttgtagtaattaaaatacctaaagct

SEQ ID NO: 1710 - protein, 570 aa, Homo sapiens [sequence omitted]

SEQ ID NO: 1711 - DNA, 9417 bp, Homo sapiens
  source
  (1)..(9417)
  CDS (201)..(299)
  CDS (1862)..(1952)
  CDS (2063)..(2184)
  CDS (2931)..(3162)
  CDS (3237)..(3453)
  CDS (3797)..(3940)
  CDS (4309)..(4485)
  CDS (9145)..(9217)
agccaggggattgcagcctccagcactggcaccctctaggtgtccactaagcacctggattgggataggtgagaggcccccaccctccgaatccacacgctgctgctggccaagggccagaaggctgtatcctagactgactctccctgcactcacatctgcgcccccattcaggcctcccatgcctctctccaatgccaatgccatctcctcaggtggagcagagctacctggccctgttctgtacacatgcctcccagctacacgaccacgtccaggacctggtgctagctgtcctggtgagggggcctggggtggtggaggctaggtcacttggggccctgagctggggacatgtgtggtccttgatgtgacacaagggttggggaagggaaagtatcaaggagtggggagcaggaggctgagaacccatgcccagggggcagagcctcatgtgagcagagactggatgctcttggtggctcacaacccactgtcccatcagatttcacttacaaaattgaaatccattataaaattattaagaatctcaagacagcaacagcagagcattgaaccccagaggcagtgccctccagagcatgaggcccagggcggttgcacaggatgagtgccctgccccaccctgcgccctccctctcctcccctccccagaggcagcctctgtcccgaactggctgtgactctcgtgcatgtctttataggcattttaatgcatatgtattcttctctgaatgacaagtagcactgtcctgcttcctatatatacagaggcagggtcttactctgccacccaggctggagtgcaatggtgcaatcacagctcacagcaacctcgacctcccagactcaagcgattctgccacctcagcctccctagtagctgggactgcaggtgcatgcacaccaccacacctggctaatttttgtattttctttggtagatatggggttttgccatgttgcccaggctggtcttgaactcctgggttcaagggatccacctgcctcagcttcccaaagagctggaatgacaggcatgagccaccgtgcctgtccctgcttcctatattaattttttatttttattttttatttttccttttgagatgagagtctcgctctgtcgcttaggctggagtgcagtactgtgatctcggctcactgcaacctccatctccccagttcaagtgattctcctgcctcagcctcctgagtagctaggatgacaggcacccgccaccacacccagctaaatgtttgtatttttagtagagatggggtttcacgatgttggccaggctggtctggaactcctgacctcaaatgatccacccaccttggcctcccaaagtgctaggatgacaggcatgagccaccgcgcccggccctgcttcctccattaatctgagtcaccatgcatctcaccgtgctgtaaccacctgctcctggatctgtcttcctccccacactctgagccctgtggatggacagggctcacttattcatcattggagcctcagggcctggcatgcggaaggcagcagcagtcaatgtttgcttcatagaatgtgggaaggagcactttggctcctggggcatgtgtcctctttgccatgcagggaacacagggtcagcagagggggtgtgtggaaggaccagcccgggcccggagagcatgctgtcctgtggggtgattgggaggtggggacccagcgtcctgggcttgggttgtgcctccctccgctcccactgggaggcagtactgccctgcccctccggtgtcaccacctccaggggttgaagacatcacccatcccagtcctgtcctgtcccacaggcccatctctactgcattgcggctgccgtggttgtagtgacttaccccgtgtgcatcagtttactgtgcctaggggtgaaggagcggccaggtatggggtttggtgaggagggaagcagaagctgggggcagggctctgcttgggggcaggttttgcttttgaactctgcgaagccaaggtgacacgcttctgcgttgcagacccctctgccccagcctcaggcccaggcttgagtttcctggctgggctgagcctcactacccggcacccaccctacctgaagctggtgatctccttcctgttcatctctgctgctgttcaggtacctctggccagctgcccccgacaggcttggtgctggccatgctgaccttgcataggttcagggtgcagtcttggcttgagttttatagggagaaacctgcggctggcacatggctcagaggggctggtgccgggagggagatcccggtagggcttgtgggaatggagggccagggcctgggcactaggaggctgacaatgtctgggcggtttcctctcacattacctgaagtgtagtcaagtccacctgatcacagctgagcaggtgatgagggtggcctaggagtggtgtttgtatctgtgttggggataagtgtcctttgtgggggaagggactgtatgatggtagcagcaagccaaggtcccaatggagatgccagactccagaccctgtccttgcccttgacttctgagctcctgccatgccctgcacatacccacttcctgtccatctcctcaggtggagcagagctacctggtcctgttctgtacacatgcctcccagctacacgaccacgtccagggcctggtactaactgtcctggtgagggggcctggggtggtggaggctaggtcacttggggccctgagctggggacatgtgtggtccttgatgtgacacatatggccagagttctggtggtcaacattttggactttgctttggtcttggtcacctgcattccagcagagggtagaattggggccaggattacaacattcatagccaccggtttgaaccaggggcaaggccaaggtcaggcatccaatctaaaagccaaggccttggggtcccaggcaaaggcgctggcagcacggccctggcgtgacgatgctgtctgctcacaggtctcagccgtgctgagcaccccgctgtgggagtgggttctccagcgctttgggaagaagacgtcagcctttgggatctttgtgagtgaggcgggaatcaaggattgggggtggccggaggggagaggtgagcgaggtgaccttggtgcctgagcctcctggggccagcaggggtggatctgtgttcccttgagtctttagggcctagcacagggcaaggcatgggggtcgtcagtcgagtcgtgtgtgaaggagcaggccccacgaagaagcaggtggcgggacagctggtgtgtgtgtctccccaggcgatggtgccctttgcgatcttgctggctgctgtgcccacagcacctgtggcatatgtcgtggcctttgtatctggcgtgagcattgctgtgtccttgctgctaccctggtaggctgggtgtgggggcctcacgtgtgtccacagtgggtgtcacctccttcatgtaaacctgccgtcccaggccccctgcacccagcctgtgcaggagatggaggccaccagctccatcctcagagccctcctgagaggacatcaggcagtaggaatggcggggggccggcagggggctggcggggggtacgagcacacaggccatctgcttctctggtggccagtctggtcctgggcacagaactcagggatgaatccactttggcctccgtccccagagaattcacaggctgctggtggccaaggggctaggagggctaactccacacccccgccgcaggtccatgctgccagacgtggtggatgactttcagctgcagcaccgtcacgggccaggcctggagaccatcttctactcctcctacgtcttcttcaccaagctgtctggcgcatgtgccctgggcatctccaccctcagtctggagtgagtcccagggttaggatacagcagaggcaccaaggaccagtgggcaggaagagggcaaagcccctcacctaccaagctcagggcatccatgagcctggggcctaagcgctactctttggagagtgtggggaaccacttccccaggtttctctgtgcatgagactgagagggccagctcccctattctcagttccctctaaactctcccaggtcagcctgtcaccttgacactcctctcctgatctgaccaggaaatgaagtccacgtttcaggagggggtggggtggggtgaggtgtcgagtccctccacccagggtgccaggctcagcaggccctgccctaatggctggctgatgtttctccaggttctcggggtataaggcaggggtctgcaagcaagcagaggaggtggtggtcaccctcaaagtcctcattggcgccgtgcccacctgcatgatccttgctgggctctgcatcctcatggtcggctccactccaaagacacccagtcgggacgcctccagccggctgagccttcggaggtaagccccgcacgccccctgcagccagcgaggcacagtgtgggctgctgggggaatgactaacaccagcctgcagacatccctgctgtgtcacacagtcctgcctctgggacctctttccttagctcagggtcacccttttctcctggattttcttctcccactctggccaccccttctcagtcttcttcctttgatcacctggtagactgtggtatgtgagggctcactccttgatctcctattgcttttgctctccaaagcccccttggtacctcttctgctagcctgacccaactcaggcactccttgtgcctggtgactgctagagctgcccctccagcctgtgcttccctcaacttccacagccgcatatcactggcatgtggacatttccacctagtagcccacaagcctggcactcagtctcgatgagcctcaatggaactcatcttgtccccctaactggctcctccttctgtgtccctgtcttggtgaatgacaccatcgttccctctgggtggaagcctaggagtcttctgctcttccctcccacgggcaatactgagcaggtctctgacctggtccttcccctaccagaacaccgaccccactgacggggaggatctactcactgtctgaccttccggggaggctatgggaaccttgaaggctgaggctggctgttttattcctttttgtatcccaagagcccagcacagagcctgaggccaagcaggtactcaggaatcactgctgcagcatcaccacgtctggtccagcagacgtgcacaagcacccaatgttcacacaagtaaggtccacgagcatgcacatatcatgcaggcccacgcgggacaggcagtgggtggccttgtcatcagccactccctgctgagggtgacggcctcgggctctgcagcagagagatactgagggcatgcttcccagtcagggaaggccaggcggatggggaactgcttgatgacacttggagaaacagggttgtagctcatctacaggacttgggaggggaggagttgaagaggagttgctgggaagacaaggagcagccaccaaaccttccgcgggcttctgcggcaggacagagggcccacaccacttccatccttctccttggcttccttcccttcccacaggaggaccagctacagcctggcctaaagcttaggagggcgactgtgaatggacacaggagccagcaccctcggggcctgacatcgccctcctcagccctccagcacctggtctggcagtttagtatgtgacctttctccctgggatgtggagtcttcggcaacgtgtcctgaagggactggcccgcactccaggaccccacttggcatttcttgtctgttgccttcagactatctcagataggcctgtgcccctgactagcccagtagcacttgtctctagaaaaaggaagctcctgcccaacctggcttgtggaccagtaatatctgtggcctaccacccattcaagaaaacgttacagccggctcactgcaaaatccgcctcccgggttcacgccattctcctgcctcagcctcccgagtagctgggactacaggtgcccgccaccacgcccagctaatttttgtatttttagtagagacggggtttcaccgtgttagccagaatggtttcgatctcctgacctcgtgatccgccccgcctcagcctcccaaaggcatgagccaccgtactcggcctgcccaggctggtcttaaactcctggcctcaggtgatcctactgcctcagcctcctgagtagctgggattacagacacagcccccgttcccagctctagcatttcttaaggacaaaattggtgtgtaagtaacaggaaattcacattatgctgtactcattctctaatatcacagccatgttagaacaaatttgggttttcaaaacaagcgtaactgaacagagtatatatatgtatgtatataaatatatagaaatcctaaatggtccctgtgacataagaaatacacatttggtctctgccccaggttcctggcacagagcttctaaaatgctagtaacttcctgagtggtaggggtgaggggaacatcttttgttatacataagaagcccttttcaaacagatctgagtttatgctaatgatgtgactggcagaggatgggggctggttgccagagaaaccaaccatgtgattagaaggttgaaactttcagccttatcttcctaccgggaggggacaggggctgaagactgagctcatcatcaatgatttaatcaattgtgcccatgtaatggagcctccacttccaaacgaagggtttcagagagcttctaggttggtgaacacatccatgtaccaggaggtctaccccactccacggggacagaaactcttgtgtaggggacccttttagatttcattctatatacctcttcagctggctgttcattttataatcaaccaataaatgttaagtaaagtgtttctctgtgttctatgcattataggaaattatcgaatctgaggagggttttgtgggaatcccctatttgcagccaagctggagagaagtgtgtatcgcctggagacccactacttgcaactggtattggaagtggggatcagcctgttggactgagcccgtaacctattgggtctgcactaactctgggtagtatcagaactgaatgaaattgtagggtacccagttatgtccatagagaactgaagaatcgcttggtgtagaaaaacccacacatctgatgtcagaagtgttctgtggttacagaaaaaaatagtttctccttttagtctcataaatattaaaggattaaataaatatttaaaaatattcccacaaagggccaggggcggtggctcacgcctgtaatcccagcactttgggaggccgaggcgggcggatcacgaggtcaggagatcgagaccatcttggctaacatggtgaagccccatctctactaaaaatacaaaaaattagccgggcgttgtggcaggcgcctgtagtcccagctactcgggaggctgagggaggagaatggcatgaacctgggaggcagagcttgcagtgagctgagatcgcgccgctgtactccagcctgggtgacagggcgagactccatctcaaaaaaaaaaaataaaataataataataataataataatattcccacaaagaaaacatgagaccaaatgatatttccaagttctagcaaactttcaatcaaggatcattcctacctcacacaaactcctccacagagcagaaaaagaaggcacactctgctactcattctatcaggccagagtaagcttcttaccaaaaccagccaagcacattaaaaaggaaagaggccaggtgtgatggctcaagcctgtaatcctgggacactgggaggccaaggtgggagggtcacttgagcccaggatttcaagaaaagtctgggcaacaaagggagaccctatctctacaaaaaattttaaaaaaattagctgggtgtggtggcacacacctgtagtcccagctacttgcggggctaaggtaggaggactgcttgaggccaggaggttgaggctgcagtgagctgtgatagtgccactcactctagcctgggcaacagagcaagcccctgtctcaaaaataaaaaaagaatttacgggctaatcttacccattaacagggaaaggaagaatcttaaacaaaataatagcaaaatgagtagcaacgtataaaaaataaatacaccatgaacatactgggtttattccaagaatgcaaagtttagcattaaaaaacctatcggctgggtgtggtggctcacgcctgcaattccagcaccttgggaggccgaggcgggaacacgaggtcaggagttcaagaccagcatggccaagatggtgaaaccccatctctactaaaactacaaaaattagccaggcacagtggcaggcgcctgtaatcccagctactcaggaggctgaggcaggagaatcgcctgaacccaggcggcagaggttgcagtgagccaagatcacaccactgcactccagcctgggcgacagagagagactctgtctcaaaaaaagaacacaaaaaacctggcaaatgaaatttaccacacagagcaatgcagagcatgaagtcaggaactctgcagagggacccctcaattatccagcagaggctgggctcagtggctcatgcctgtaatcccagcacttgggaggctgaggtaggcagatcacttgagatcaggagtttgagaccagcctggccaatatggtgaaaccccatctctactaaaaatacaaaaattagatgggtgtggtggcgggcacctgtaatccgagctacccaggaggctgagacaggagaatggtttgaacccgggagttggaggttgcagtgagccaagattgtgccaatgcactccagcctgggcgacagagtaagactccgtctcaaaaaacaacaacaacaacaacaaaaaccccccaaacaaataaaattatccagcagaatactgattaaagacataaatatgaagacaaaacttccataaaaaggaagataggtaaatgtgtggcttccttaaaattaaaatgtttgtccaacacacaaggtataaagaaagaggaggccggcaggagttcgagactatcctggccaacatggtgaaaccccgtctctactaaaaatacaagcattagccaggcgaggtggtgcatgactgtagaacattaaacaatcctttgaagaatttagctcttttctccctgcctccaaagccagcaaatatgagattattttctattgttccagtgactgtaataatagcagaggtcaaggaaacatctcttgtatgagagttgtcatggaatcagatttgttgtaa

SEQ ID NO: 1712 - protein, 384 aa, Homo sapiens
MPSPQVEQSYLALFCTHASQLHDHVQDLVLAVLAHLYCIAAAVVVVTYPVCISLLCLGVKERPDPSAPASGPGLSFLAGLSLTTRHPPYLKLVISFLFISAAVQGQGQGQASNLKAKALGSQAKALAARPWRDDAVCSQVSAVLSTPLWEWVLQRFGKKTSAFGIFVSEAGIKDWGWPEGRGPSTGQGMGVVSRVVCEGAGPTKKQVAGQLVCVSPQAMVPFAILLAAVPTAPVAYVVAFVSGVSIAVSLLLPWSMLPDVVDDFQLQHRHGPGLETIFYSSYVFFTKLSGACALGISTLSLEFSGYKAGVCKQAEEVVVTLKVLIGAVPTCMILAGLCILMVGSTPKTPSRDASSRLSLRRYKERGGRQEFETILANMVKPRLY

SEQ ID NO: 1713 - DNA, 19533 bp, Homo sapiens
  source
  (1)..(19533)
  CDS (201)..(282)
  CDS (4170)..(4399)
  CDS (4589)..(4715)
  CDS (6018)..(6143)
  CDS (7963)..(8021)
  CDS (10682)..(10814)
  CDS (11319)..(11424)
  CDS (11721)..(11856)
  CDS (12043)..(12096)
  CDS (12183)..(12246)
  CDS (12483)..(12538)
  CDS (13014)..(13425)
  CDS (13495)..(13817)
  CDS (13990)..(14196)
  CDS (14360)..(14448)
  CDS (19279)..(19333)
agctcggcggcctggcctggcctgctcgcggggaggtgcgcagactgcgcgggggcgtggcctgcgcccctgactgcgctgtcggtccggcctttgatgaggtggccgccgctggctccctgggccccagcctggttcccgcgcgggccgcggctgccttccagacgcagggcatgcgacctgttggagtgtgaaattctatgggccgggttcctccccagagcggttttatttccgactggactgtgctgcgggtctcagaggccctctggtccgttcagggtgaggacagctgagaggcctgggcccgtgagctcttgcagaggagttgacacgcagaggggctgctgtccaataaacgaaagtgtcggggaaaaactttgcagggcgatctgcattactccaaagtgaacacactgcatgtctcagggtggctggaggcggcgagaatccccttatgggagtatatgagcttttccatgtgttatctctttaaaacctctcagcggctccgagacaaaactcccagtgtcgcagaggtttcttcatcaataggagtagtgctggagaatcttgggcactgccctcattttgcctgcgaaggaaaaattaggaagggataaaaagtcacaaaaattaggaaggtgggggggataagcaaattccaagggcatctatctctgatgaagggttggtgtctcctgtggtgccctactgtggattagttatttgtgtcctcggtccagaagtttctctggagcccattggctacagctttcctgtattagaattctactgttatttcctactgtagtctggctgggaattttatttagttgttcagattttagatgcattcagtgaatgcagctgctcaaggaagtaactaatagtgtcttaccattttcttagctacttttcagaagaaggaacatgatctctaacagaagttttctggtagattactaaaacaggcagatagtagctttcctggctggctgagttaaatccctctccagcgatcctcccacttcagcctcctaagtagctgggattacaggcatgagccagcgcgcctggcaaatctctctagaataagtcaggatctagaaaataacatagggaaagaatatcttgccagatttcctctgtactgcctattgctctttggtatttactagactgtcttctaataaaaatctcctgagttgagttaaacgtagtgtagattgggggcagagatgggcacaaatgggcatcagagagttctaaaaataaatgtgggcttttcaaaagattggtgtgttgactggagacttctgaacttagaggagcacatttagtttccagggtatcagtttctttttcttttctttctttttttctttttttttttttttttgagtcatagtctcactctgtcacccaggctggagtgcagtggcgccatctgggctcactgcaacctccgcctcctgagttcaagtgattctcgtgcttcagcctcttgaataagctggaattatagacgtgcgccaccacaccctgctaatttttgtatatttttgtatttttttgttgcccaggctggtctcgaactcttgagctcaagcaatctgcctgccaccatctcccaaagtgctgggattacaggcgtgggccagcttgcctggcccagggtatctctttcatactgtagagaactctcttgagctgagcacacacaggttccaactccttcacagtctttattcttagagatatgaaataacattaagtggttgtcttgtgactttttgtacaagttaatggcatttagctctcaataattctttttcttcaagtacccatgaccctgaaaatgttatgctgtataatactttttcctataaaagttgtaccttgagttatttatacttgtaagaaataacctaggctgggtgtggtggctcacgcctgtaatcccagcactttgggaggctgaggcgggcggatcatgaagtcaggagattgaaaccatcctggctaacacggtgaaaccccatctctactaaaaatacaaaaaattagctgggtgtggtggcacgtgcccgtagtcccagctactcgggaggctgaggcaggagaatcgcttgaacctgggaggcggaggttgcagtgagccgagattgcaccacggcactccagcctgggtgacagagtgagactccatcccctctgccaaaaaataaataacctatatcagatctagtcccccagagaatggaaacttcagagcctttgagcaatgtgaatgaaatgaaagctggaagcttaaagtcttagctctggcttgaatttgtggctgcttgaatgtgggcatttattttgtttgttattgtatctcaaggacttagcccagtgcttggcccacaataaatgcttaataaaacatctgttaaatgagtgaatgaaaaaaaaaatgttgttaaccaatacccatttgtcacactcacatcacaggaaaggtgaggtcatcagggatgaagtcactaacaactgccagtcatgtgccccaagggtagcctcaccatggactagtgggcttgttctgtgtagagaagggatggatagtgaatgccaaggttagttctagctggataaattagccaagggtttcagctggataagttggctgagggtgctacaggtctagccttaaggctgtctcactgaaacattttggagtctggagtcatctgttctgaatagcgcccacatagtttatatttttttattttttgagacagagtctcactctgttgcccaagctggagtgcagtggcacgatctcagctcactgcaacctctgcctcccgggttcaagtgattctcctgcctcagcctcctgagtagctgggactacaggtgcgtgccaccacacccagctaatttttttatttttagtagagacagggttttgccatgttggtcaggctggtctcgaactcctgacctcaggtaatccacctacctcggcctcccaaagtgttgggattaaaggcgtgagccactgtgcccgtccacacatagcttaattcttgagcacagtaaaaatagggtgtacttggggattcaaagggaagcctattggatgagtatttgccaagaaggaatggagcacctgattttgctggtgatttgaaccttactctaagtgggattagactgccataaatcttgtgtttgtcattcctgggagggtcatcttcaactaagatagctccccttttctagactagagttaggagaatagttaatgtttcagtatttaggactgattctgattttggatttaaaggaaacaaaggtggtgtgtgttttctatttttaatttttaaaagttttgtgtagagactggggtctttttatgttgtccaggctggtctcaaatgcctggcctgttttattttcttttgaatttgcagataagtattaggattattaaatctttttttttgtttgtttgttttttgttgagacagggtctccctctgttgcctagccaatggcatgatcatagctcactgcagcctcaaactcctgggcaatcaagtgattctcccatcagcctctcgggtagctgggactatagctgtgtaccaccttgccctgctaatttttaaatttttttgtaaagatggggtctcactttgttgcccaggctggtctcaaacacctggcctcaaatgaacctcttgcctcggcttctcaaagtgctgggattacagaggtgagccactgtgctcagctggattactaaatttttttttgagatggggtcttgctctgtcacccaggctggagtgcagtggcgtgatctcagctcactgcaacctccacctccctggttcaaaaaaattctcctgccttagtctcctgagtagctaggactacaggcacgcgtcaccacacccagctaattttgtatttttagtagagatggggtttcaccatgttgatcaggctggtcttgaactcctgacctcaggtgatctgcccacctcagcctcccaaagtgctgggattacaggcatgagccaccacgtccagcctggattactaaatctttacagatgtatcctgactttctctgccttttccctctgtatttgccccaaccagtgcaggcctgagtgttccttccagcatgtcggagggggagtcccagacagtacttagcagtggctcagacccaaaggtagaatcctcatcttcagctcctggcctgacatcagtgtcacctcctgtgacctccacaacctcagctgcttccccagaggaagaagaagaaagtgaagatgagtctgagattttggaagagtcgccctgtgggcgctggcagaagaggcgagaagaggtaaggttatggtacagttactcttgggtgagtgaattctggaaaggtgagaactggaagagcaaagtcttaaaagaggccaaccaaacttcaataggttgggggctaggaggagatgatcatatggagtgttaaaatggaggatttgtgagataagtttaattctctttcatatgaatttcttctcaggtgaatcaacggaatgtaccaggtattgacagtgcatacctggccatggatacagaggaaggtgtagaggttgtgtggaatgaggtacagttctctgaacgcaagaactacaagctgcaggaggtaggtgatgctgaaaaggtgaagcctggggaatgttggaacactgatgttagagaggaattggtgttgggaagctgcccgtgaggagagtatgttggggttagatcgtttctggggagggatagggaatggcttctcaggattattacagtgatttgtgactctgttattccactgtctcccttgctttcaggaaaaggttcgtgctgtgtttgataatctgattcaattggagcatcttaacattgttaagtttcacaaatattgggctgacattaaagagaacaaggccagggtaagaattttttccccatatttcctgaacttattgcaaagagactagctacatttattattgttccttttacactcagagattaaaacaaggtagttttgaaacagaactggaatcagctgcaatggcgataagagtagggcttcagttgtcacctatgccttttgtgtggctatagattgggcagaaaatgagtgaacttttgcttctttcttcccataactttcattgcttgttttcattgccctatttagtctaagtaagtaaagctaagaacaaaaggagagaaattttaacaaaccttcaaatttaaaatatgttaacaagggaagggatcatttctactataaggccttttagtaagtgctttgcctccccaggtcatttttatcacagaatacatgtcatctgggagtctgaagcaatttctgaagaagaccaaaaagaaccacaagacgatgaatgaaaaggtatagaaggagagcagacaaagtttgaggctggtttttgggggtggttttaaaaaggactctgttaataatgaagctgatcaggaagggacggaaggagctagtgggagagagttaagagagggaattactgctgacccttggatccaactttgttccaggcatggaagcgttggtgcacacaaatcctctctgccctaaggtaagtagtacctggttagtttcttacccatatttcctgatgtagttactccaaacagatttcagggcactactcttctgttctattctgcctctccccactttctttgaatcatatactgtcaagattagggcccctacgggtcttttaaagggtgcgtcctaatgccctaaccacgacacttatctcctacctctttctcctagtgcttatccagctatttaaatcatcaggcataatggagattcagagtgtggggattatctttatggtgaccagcaggagacctggcccttgctcctcttaacccttgggttccccctgcccttaatttcccagtggcccctctaacagcccagtgcccccacagctacctgcactcctgtgacccccccatcatccatgggaacctgacctgtgacaccatcttcatccagcacaacggactcatcaagattggctctggtgaggggagggagaggttctgggcaggggagcctcgggaatttgggaaccatgggggtaagatgaaaggaatgggggataacagagcaaaattctgaggtgtgggctggtgagaagagaaaggaccttgctaggagtaattaataggagaggccagttaattagtggagagggggtaggatatataatcttacacctttttgaagggaaaattggggttaatacagagatactgataagaggctgggaaagggcaagagataggtttgaggtttgatttgagtcctggggccagaccctgccagaggaggttccaggctgttcctgctgtgagtgctttcgtttgctgtgtattgtatgcagtgtacaacatttctgtgtgctgtgtctgtgtggtatttgtgtgtccatttgtctggggcttggctgctccatcgctcacaacttttctctgttttcctccctcccgcttacgggctgctctgttcccaacagtctttcataggatttttgctaatggtgagagctccctctgccccacttggggctctgtttgtgctccctctgctcccttggcggctgcccagtgcatgcagtcgtgggagcaaaccctcttcccctatcttccctgcctaattatgcctgcttagcttctgccctgccagccctccgcctgcttgccccttcataacctgcttgtttcctgtggattctgcctggctggccacttacctcctggattcatgttctccctcatcatcaggctagttcccagatcatactgtgctcccagattctctgtgacttgtagtcattgtttatgatctgagtgagtccaaattgggcctggtcctggttcctcgttcagctctgtggcagacagtgttgaggaataagggggtagaacaggagtctaaaatgttttggtggattaaaagtggaacagattcaagggtattagctcaattctgagctgttttgagtttcactcagcaaaggtgggtaagaaggaggctacctcctgagctgtatgttaatacttcttatccttatttatccaagttcctgaggtctccaattgtcccagattaggaagggctgcctgtgtttttatgttatttgcagggtggatgaaaaaactaaaaccaaatattttcatgtgagcagggattagaggtacctgggatttagggaaggtgaacgcagtacaagtgaaaatttttccttaaacttcattgcttctagaccagcctgaagcccctgtgtatctgttaatttagtctggtgcttttgttgctcctgatttagggacattagatgagaagcagtaggcctaagaaaggggaggtaggtggcatccatgtgtggtctgtagttcaggacaggaaagggaatatgtttgtgcctgttgagggtcatcagaaaggagacttcaggagagaatttggcttttggggcctctctctggagtgagactattcttcattgatgatggtcagattgtgggtgtctcccctactcccagtggctcctgacactatcaacaatcatgtgaagacttgtcgagaagagcagaagaatctacacttctttgcaccagagtatggaggtgagccttcctgctttctctgccctgtcctcatccccctgcttttgcaccttataacttgaggtacagaggcaatataactgaaacttctaggccttctctaccagcatacaaaatatttttcttttcttttttttttttcctaaggcattcctgccaaccctagcccccaatcctctgattaaccaaagccttctctgttttccctagaagtcactaatgtgacaacagcagtggacatctactcctttggcatgtgtgcactggaggtgaggggactggaggggaggggggaaaggggtcagatgagaagatggaattgggaatggagggaagacaagtaaggcgctggcttggagggagtgattgtgggagcactgaagttcttaggtgtctacttttttttttattcttcctcactgaagatggcagtgctggagattcagggcaatggagagtcctcatatgtgccacaggaagccatcagcagtgccatccagcttctagaagacccattacagagggtaaggatcttcaggatcactccctcctcaactgaccttcaaatgtcttctggtttttcttcctttgtacccactgggtatatgctcctaagagctagggaacataacagaaaggacacgaaaaatctataaacattttcttaggaggtgcctaccatgtttttgcatagaaacacacaggtaagggggttaagatggatgatgctggggttaaaagttgtgtgttggaagccgggcatggtggctcacgcctgtaatcccagcactttgggaggccgaggcgggcggatcacgaggtcaggggatcgagaccatcctggctaacatggtgaaaccctgtctctactaaaaatacaaaaaaaattagccaggcttggtggcgggagcctgtagtcccagctactcaggaggctgaggcaggagaatggcatgaacccgggaggcaaagcttgcagtgagctgagatcgcgccactgcactccagcctgggcgacacaggtagactccgtctcagaaaaaaagaaaaaaaaaaaagttgtgtgttggctgggtgcagtggctcacacctgtaatcccagcactttgagaggctgaggcgggtggatcacttgaggtcaggagtttgagaccagcctggccaacatggtgaaaccctgtctctactaaaaatacaaaaattagctgggcatggtggtgtgtgcctgtagtctcacctactcgggaggctgaggcaagcttgaacccgggaggcggagattgcagtgagctgagattgggccactgcactccagctggggcaagagagcgagactgtctcaaaaaaaaaaaaaaagtatgttaatttgaatgtgtctacatggaggtaaattaatttgatggttacttcaggccattgctgtatactctcagacagccatttttatatttttaagcacatcagtcaatttaaattaaaccagttgtttgggattttatatttatacagttttagttagggacggtggcctgaaataatgagctaagatttaaaagacataaggttatgaatcagttgatagactatagtaagcagagcctgggcaggaaggtccaaacaagaacagtttgtaactcattagataagtatagtagggaacaggagagaaaagaagactagtgggaagtcaggaggatagtgtggagtaagtttctacttcaacattgaggtggagtattcaagtgaaagattaggtatgtgaccttgttagccttcaaggttaaaagcaggaaagcaggttaattgtcatgggacatgcaggaggtagaaaaggaggcggtggtggaacatggtggctcatacttttaatcccagcacttttggaggctgaggtgggaggatcacttgagctcaggagttcgagactagcctgggcaacgtggtaaaaccctatctctatgaaaaaataaaaattatctgggtatggtggcacatgcctgtggtcccagctactctggaagctgaagtgggaggattgcttgagcccaggaggttgaggcagcagtgagctgtgattgtgccactgtactccagcctggttggcacagcaagaccctgtctcagaaaaaagaaagaaagaaaataaggcagaatcgttagaggaatcctgggaaattcggtgaattcagtgattgtgggcaaaggaaattgtgatactaggcttgtgaaataaaaaaatggtgaatattgatcacattgggtaagtttgggaagagagaagctaaatttggcaagatttagaaaagaagataggcagtgagttgactaataaagcagagaggtagaaactaaggaaaaagaaagtgtggggccgggcgcggtgtctcatgcctgtaataccggcactttgggaggctgaggcgggtggatcacgaggtcaggagattgagaccatcctggctaacatggtgaaaccgtctctactgaaaatacaaaaaattagccgggcatggtggtgggcacctgtagtcccagctactcgggaggctgaggcaggagaatggcgtgaacccggtaggcagaggttgcagtgagctgagattgcgccactgcactccagcctgggcgacagagcgagactccgtctcaaaaaaaaaaaaaaaaaaaattgtgaacattaaaaaagaaagcttgtggttggagagcagaaaaataattaaaaccagaaaggcagtggatggtatctttcatataatatcttacagtttttgaagccctttcaggtgcatttttcaatatattgttttctcagcaagtgctgagcacctactatgtacaaagccttgtgctaagtagaatgagagctataaagatgaacacactgggggcttgccagatgcctgctccagttccttgtttccttttctaggagttcattcaaaagtgcctgcagtctgagcctgctcgcagaccaacagccagagaacttctgttccacccagcattgtttgaagtgccctcgctcaaactccttgcggcccactgcattgtgggacaccaacgtgagtcgtcttggccctatggggaatagtcttccaatctggagccctgtaactatcactggcatgcttgttttcctctttatttccaaagggattcttttttttttttttttttttttttttttttttttttgagacagagtctcactctctctcaggctggagtgcaatggcttgatctcagctcattgcaacctccagctcccaggctcaagcgattcttgtgccttagcctcccgaagagctgggattacaggcatgtgccaccatgcctgggtaatttttgtacttttagtagagatggggtttcgccatgttggccaggctggtcttgaactggcgtcaagtgatctgtccgcctcggcttcccaaagtgctgggattacaggcatgagccactgtgccaggcctccaaagggattctttacccctttgcctgcatgccttctttgacatttaatctgactatcccttcataatatcccactccatcatgccctccagacatgatcccagagaacgctctagaggagatcaccaaaaacatggatactagtgccgtactggctgaaatccctgcaggaccaggaagagaaccagttcagactttgtgagtaactgagagggtctgaaaggggcagattggtcacgaccactcttgaggctctgtaaactgtccattctctgggaatgcttgaatttgctattttgcttgtttctttccttccatctcctttctcttttctcgtccaggtactctcagtcaccagctctggaattagataaattccttgaagatgtcaggtgagagcagagtgagaagcaggctttcttgaggaagcaggcggggttgggtatcctaaggcgttcacagagcccatgtgacctgtcttcatctccctccaggaatgggatctatcctctgacagcctttgggctgcctcggccccagcagccacagcaggaggaggtgacatcacctgtcgtgcccccctctgtcaagactccgacacctgaaccagctgaggtggagactcgcaaggtgggggctgtgtgggtgtggattgtctccatggttgtggtggaagggagagaggacatctcaaataaggctctatcctttagagaaaatgctccctagcagccatgccctatgggctcgaaagacgtctaggtattgggttttttatggacaggtctctagagtgaccctctcttccctccctaggtggtgctgatgcagtgcaacattgagtcggtggaggagggagtcaaacaccacgtaaggctcagggctagggttgcgcagggctagtagccagagggtagggaagaaaagtctcattttctgactgtcctattctccagctgacacttctgctgaagttggaggacaaactgaaccggcacctgagctgtgacctgatgccaagtgagtctctcctttccctcagaggatggagagtctatgagccttatcttttagggacatattcaggggtgggggaggtgacaaggcagtaacacattgactcacatagaatgactatcttagaccctaaagcagtgggtggatctgactgacagtttagccctagtggggctgtctgaagggccccaggtccctcagtcccgtactgtactcaccccctcctgtttctttgtcagatgagaatatccccgagttggcggctgagctggtgcagctgggcttcattagtgaggtgaggtttctgccttcatctgccctggctgcccccatgccttctcttctctcagcccccatcttactgagctcttctcccccaggctgaccagagccggttgacttctctgctagaagagaccttgaacaagttcaattttgccaggaacagtaccctcaactcagccgctgtcaccgtctcctcttagagctcactcgggccaggccctgatctgcgctgtggctgtccctggacgtgctgcagccctcctgtcccttccccccagtcagtattaccctgtgaagccccttccctcctttattattcaggagggctgggggggctccctggttctgagcatcatcctttcccctcccctctcttcctcccctctgcactttgtttacttgttttgcacagacgtgggcctgggccttctcagcagccgccttctagttgggggctagtcgctgatctgccggctcccgcccagcctgtgtggaaaggaggcccacgggcactaggggagccgaattctacaatcccgctggggcggccggggcgggagagaaaggtggtgctgcagtggtggccctggggggccattcgattcgcctcagttgctgctgtaataaaagtctactttttgctaaaagcgtcgtgtgttcgcgcctttcccgccagggggagcgggcccggggcggaggcggggcccaggtgggagggggacccgggacggaggcggggcccaggttggggcggggccgggcccaggtacagcggccctgcggctggcgcggcggacgggatgaggcgctgcagtctctgcgctttcggtaacttccgggccctggcgtctcgtctccttaccctggggctacccttgccccgtcctactgcccgcggttaacccgccgcgagccgcctctcccctccccgcccgactcaaccctgccctcccccgtgctttgcagacgccgcccgggggcccaggcggctgatgcgtgtgggcctcgcgctgatcttggtgggccacgtgaacctgctgctgggggccgtgctgcatggcaccgtcctgcggcacgtggccaatccccgcggcgctgtcacgccggagtacaccgtagccaatgtcatctctgtcggctcggggctgctggtgagcgcggcaggcgacccgggcgggggccgggctcccggagagcccagcaggccaaaggctttgtgtcttccacagagcgtttccgtgggacttgtggccctcctggcgtccaggaaccttcttcgccctccactggtgagagggacttccctggagcttttaacgagtaggcttgagtcagggaaatgggggctgactgagcttggtctttcaatagattggaggagcctcagagaaactgggtgtctagtcactgggagagttagccaggcccaggctgctcaccctgatctcctgtccctgccagcactgggtcctgctggcactagctctggtgaacctgctcttgtccgttgcctgctccctgggcctccttcttgctgtgtcactcactgtggccaacggtggccgccgccttattgctgactgccacccaggactgctggatcctctggtaccactggatgaggggccgggacatactgactgcccctttgaccccacaagaatctatgtgagcacattctcttccttcttgtggtctacaaagccttggtcctgcccttttaatttcccctatttgctgcacttgccctactccctcctactccccatccttcttgcttttcaggatacagccttggctctctggatcccttctttgctcatgtctgcaggggaggctgctctatctggttactgctgtgtggctgcactcactctacgtggagttgggccctgcaggaaggacggacttcaggggcaggtaaggaaggcaaacaggaagggttcattccacagagactggctgtgttgaaaagatgctgaccggccgggtgcggaggctcacacctgtaatcccagcactttgggaggctgaggcaggcggatcacttgaggtcaggagtttgagaccagcttggacaacatggtgaaacctcgtctctactaaaaatacaaaaaattaggtggggtggtgggcgcctgtaatcccagctacttggaaggctgaggcaggagaatcgcttgaacccggaaggcggaggttgcagtgaaccgagatcacgccactgcactccagcctgggcaacagagtgaggctccgtcacaaaaaacaaaacaaaaaaaagatgctgacctatcattcagggcgagggtgtctaactctatcttcttctgcagctagaggaaatgacagagcttgaatctcctaaatgtaaaaggcaggaaaatgagcagctactggatcaaaatcaagaaatccgggcatcacagagaagttgggtttaggacaggtaatgggccttgaaggtggtggcccgggtaagagcggggacaaggaagtgctcttagaactgggtctaggtcttgccatgctgctttcccctctgacctgggttggttctcccctctgtccagcaggtgctgttccgagactcagtcctaaagggttttttttcccactaagcaaggggccctgacctcgggatgagataacaaattgtaataaagtaacttctcttttcttctacttgattatgattccttttggggaaaaggcactgtgtggtgttgggaatgactttgatcaaagaatacagtggtctcaattatttataaaactttaatgagggagaggccctaactcttcctcagctctaccaactactgaaaggaaaagctggtgctggggagccctccacaccactgactgatgaatttcagcacgtcctggcacactgggctgtgggaggtctgtgagcaaatggaagaacatgagaggaacttgttaatgctggaaatacaaaatcagctccatcgcaggcttcagggtctgcatctgccttcctgtaatcccacccatctttctagtgtgtatgtgggttttttgtttgttttgagacaaagtcttgctttgtcgcccaggctggagtgcagtggcacaatctcagctcactgcaacctctgcctctcgggtttaagcgattctcctgcctcagcctcctgagtagctgggattacaggtgcacgccaccagacccggctaacttttgtatttttagtagagacgaggttttaaccatgttggccaggctggtctcaaactcctgacctcaggtgatccgcccaccttggcctcccaaagtgctgggattaaaggtatgagccactgcacccagacttgtttttttttctttttttagtgctgccctctctgccttcattctccaagtcctcctctctaaccttgatggccataaggaatttattccagttgtccttgttagcagccttccctggccgcttaaattcaattttgttcctcagaatggggtatcctgtggaggaagaaaaaatgatgaactggggtttgagagagattgaggagggaaaaatgaggagcagcctggggggtagaaagcacagtcctgtcttttgtaccctttactgaatcctagtaaaattaagtttattgatcctgctgctttctacccaccacaggatctggggtgctgtaggcttctatacctgtaataaggcagggcagggctcgaacaccagtgctcgctgccactagggaggcctcgtaggcgccacgctcatcccgaggcagaacctgctccagccgctggtccatggagactgtaagcacccagtctcgaacctcttctctctcagcctcctggaaaggacaagaagggagtggtagcttcacacagggcagggcaggacaagttggggtggatgggtgaggagggggtttgctaagccctcatcctgtataccagcttttagccacgaatcctccttggattgggggatgcagtcacagccttttctttctattttgcttctactttcactgaaaaaacagtgagggctgaggtccttccaaagatggcagcacaaagatattctccctcctcaaggcactcacactggtgaggccttccggttttccaaccctgtgcccttaccggtacatgctgcttagctgggagtggcacctcaaagggaatgtctgtatcctgaaaatcagagtggtcaaggccatctagagtcccttcctcgattgcctgcagtagagtgggcaaccatgaactaggcacagctcgcgactggcaaaaacctccaccctcggggcacagcttccctactcacatcggtcaggtccaaaaagcgattgaggaagatgaatgccatgttatcccagccaactgcctgcagcaaagaagagttgcaaatgggagtgaacaagctgggtttgaatgctacttctctgggatccagatgcaaatgggagtgagcaagctgggcttgaatgctatttctctgggatccagggagaaaaatccaggaagacataggaggactacatcctccgtaacatcagccctacactcagctttcctctaccagagcagaagggatattctattttccaacctttaacttcctcctatctgccccacccttccttgtcccagctcaccttggcagcaatgcctgcttcatagaaggctttgtctacaggtagtagctgggtgtgacgcaagagtgaaacagaaagcctggcagccacggtttcctgggattaaagtcaaagcattatgaatatggcactaaagtgactgagctaccagaccaatgatcctgtaaggcagccacagaactaaaaaacaacaattattattaaactgctctggattctcaagctgttctgggtcttagttttttttttctttttctctgaacaagacacctgggcctaggttcaattctttcgcccaggctggagtgcagtggtgccatctcagctcactgcaacctctgcctcccggattcaagtaattctcgtgcctcagcctcctgagtagctaggactacaagcgcacattaccatgcctggctaattttttttttttttttttttttttttttttgagacggagtctcgctctgtcgcccaggccagactgcggactgcagtggcgcaatctcggctcactgcaagctccgcttcccgggttcacgccattctcctgcctcagcctcccgagtagctgggactacaggcgcccgccaccgtgcctggctaattttttgtatttttagtagagacggggtttcaccttgttagccaggatggtctcgatctcctgacctcatgatccacccgcctcggcctcccaaagtgctgggattacaggcgtgagccaccgcgcccggccaacctggctaatttttatgtttttagtagagatggggtttcaccacgttggccaggctggtctcgaactcctggcctcaagtgatccacccgcctcggcctcccaaagtgctgggattacaggggtgagccaccacacccacccacctagattgtttctaaggttctttccacttctagaattctatcatccaagtacatgaaataaatatacagtgaacagtcaaaaataagcccagaatatgtgtacattataagaggtgaataaagaaatcatgggatttggatgtttaaacataatgaggctgaggctgtgtgggcacagagccctaaaaaggtcggaagaagaaaacctcagcaagggctaaagatttgtttagacagaagagaagctgaaagacaggtggggagattcaagagcccaagctgaagaatccagaacgtgaatcaattcagctttatacatttgcagatgagcccttctgactgagtgttccttcgaccccctacatctcaccagctgtttgacactctgggctgcagagcgcgtggcatagtaatgagcgatcagcagcatcgtcttgaactcctcatgggctggagagtttgcctcactggacttcaccaggttttcacactagaggagggagacagcacagcctggctcaggggtcagaggagtgccagggccatagagtggtctctgatagccacctggcagaggaaggtaaaatacatctgagaataaaggtttatgtgcatcaaagaagagatgaggacaaggacagacggagcagccctttcgcttcctcaccaggttgaagaggacatctcgaagatcagcccagctatgataggcctcggcacagttggttccaggagagctcaccatgtcagtgaagatccttttgtagatattgaagttctagaggtagagggaagaaggggatctgagaagggcatagctagaagagaaagtcactggaagtggggccaaagggaggagaaacaggctttgtgtgtagaaatgggtatgtgtgtgtgtgcaagggctgggggacagtggcagatttttatttttatttatttttatttttttaattttatttatttatttttgagacagagtcttgctctgttgcccaaggctggagtgcagtagcatgatctcggctcactgcaagctctgcctcccaggttcatgccattctcctgcctcagcctcccgagtagctgggactataggtgcctgccaccacgcccagctaactttttatatttttagtagagacggggtttcaccgtgttagccacaatggtctcgatctcctgacctcgtaatccgcctgcctcggcctcccaaagtgttgggattacaggcgtgagccactgcgcccggccaacagtggcagattattaagtgctgattatttttaatgaagtaaattatttttaagtgctgattatttttgataaagagaaaagaggaagaaataactttcttagctggtgctgtgtgagtgtgggcaactgtacaaatgtaaatgcagagtcacaacattgtgactcagatcagggagcagtgttcattctctggaggaagtcaataaaggccctaga

SEQ ID NO: 1714 - protein, 752 aa, Homo sapiens [sequence omitted]

SEQ ID NO: 1715 - DNA, 10948 bp, Homo sapiens
  source
  (1)..(10948)
  CDS (201)..(572)
  CDS (1011)..(1148)
  CDS (1986)..(2325)
  CDS (2353)..(2484)
  CDS (2638)..(2820)
  CDS (3675)..(3857)
  CDS (4320)..(4429)
  CDS (4632)..(4697)
  CDS (4867)..(4992)
  CDS (5152)..(5228)
  CDS (5316)..(5379)
  CDS (5492)..(5577)
  CDS (5753)..(5810)
  CDS (6327)..(6431)
  CDS (7312)..(7406)
  CDS (7489)..(7557)
  CDS (7741)..(7845)
  CDS (9174)..(9447)
  CDS (10656)..(10748)
  modified_base (6983)..(7082): a, t, c, g, unknown or other
  modified_base (9991)..(9991): a, t, c, g, unknown or other
  modified_base (10873)..(10873): a, t, c, g, unknown or other
acgtgctccttcccgggacccccgcagcttgggcccagcggctacgtgagcaaggcacccggatgtccgcgccgctctccgagtgaccagtcccggcctccggtcccgcagtgcccgcagcctcggccggcgtccacgcattgccatggtgactgtgggcaactactgcgaggccgaaggggcccgtgggtccggcctggatgcaggatggcctgagtccctgcttcttcttcacgctcgtgccctcgacgcggatggctctggggactctggccttggtgctggctcttccctgcagacgccgggagcggccgctggctgctgattcgctgtcttggggggccggccctcgcatctctccctacgtgctgcagctgcttctggccacacttcaggcggcgctgcccctggccggcctggctggctgggtggcactgccgggggcgcccactgccaagctatctacttctggcctccgtgctggagagtctggccggcgcctgtgcgctgtggctgcttgtcgtggagcggagccaggcacggcagcgtctggcaatgggcatctggatcaagttcaggcacagccctggtctcctgctcctctggactgtggcgtttgcagctgagaacttggccctggtgtcttggaacagcccacagtggtggtgggcaagggcagacttgggccagcaggtgagggactctgtgggaagggggaagcctctgctggccgggcttgggagaaagcactgcatgtccagtcacactgcttccaggctttaggatgcctctaagcaaagggagaagggaggggctgagtcctgccgggagctgatagccagctggtggggtgtgtctttgctgagtcactgtggttttgcttttttttttttttttaagcctgtaagtgctgaatgtgttcatgacaccagtccccggccctattataagtagtaatacaatgaaattttatcctcaatgatactctctccacttatatttcattctaggttcagtttagcctgtgggtgctgcggtatgtggtctctggagggctgtttgtcctgggtctctgggcccctggacttcgtccccagtcctatacattgcaggttcatgaagaggaccaagatgtggaaaggagccaggtacacctcagtttctttttttttttggagacggagtcttgctctgtcaccaggctggagtgcagtggcgtgatctcagctcactgcaacctccacctcccgggttcaagcgattctcctgcctcagcctcctgagtagctgggactacaggtgcatgacaccacacccagctaagttttgtatttttagtagagacagggtttcacagcattggccaggatggtctcgatctcttgacctcgtgatccgcctgcctcagcctcccaaagtgctaggattacaggcgtgagccactgcgcctggcctctttttgtttttaagacggaatcttgctccgtcacccaggctggagtgtagtggcgcgatctcagctcactgcaccctctgcctcctgggttcaaacaattctcgtgcctcagcctcccaagtagctgggattacaggtgtgtacccggctaatttttgtatttttagtggagatggggtttcaccatgttggccaggctagtcttgaactcctgacctcaggtgacccacctgcctcggactcccaaagtgctgggattacaggcatgagccactgcaccagaccccacctcagtttctgaatcctggagtctcttcatttcattccctgtcatcattccttcccccaaaatgaaatgcttcttttccaaatctcagtttgcaacttagtttttctgaccccatcaaggatcacttgtgggtctgagatacctgggagctgtaaccccataggtttttccctgaagggtttctggctagtgcacttacttgatttctgagctcccttcctacgtgtttcaccatcctaggttcggtcagcagcccaacagtctacctggcgagattttggcaggaagctccgcctcctgagtggctacctgtggcctcgagggagtccagctctgcagctggtggtgctcatctgcctggggctcatgggtttggaacgggcactcaatgtgttggtgcctatattctataggaacattggtgagcaggaggagcaccagctcagtgtgctggtccttcatcagcctggtggctgggatggtccttacctagggaggtgggacagagctgggtggtcagaaagagactgtggctggtacctggggccattttgcctgaagagagtcctgggcgccataagtgggttctgactcgtttcctccacagtgaacttgctgactgagaaggcaccttggaactctctggcctggactgttaccagttacgtcttcctcaagttcctccaggggggtggcactggcagtacaggtatgagagactccgccctcaccctgctaggtataggtccctcccacaggcattccctcagcatccgcctctcccagcattcctccccagcccccatgtactctcagacctttcacatcctggtgctgggctgacgtccctcagctcccaggccctactgaggcgtcccccggctccctgcaggcttcgtgagcaacctgcgcaccttcctgtggatccgggtgcagcagttcacgtctcggcgggtggagctgctcatcttctcccacctgcacgagctctcactgcgctggcacctggggcgccgcacaggggaggtgctgcggatcgcgatcggggcacatccagtgtcacagggctgctcaggtgccgccccagtggaaagggcatgtgggagggtggagccggagaagcagggataggggcccgtgggaggaagagaacagaccccgcctgagaagctgccgctcccaccttggtgttttttaaagtataggattattgtatacatgctctcctaataacttaggtaatgcgggcagagggcaaatctctttcgagctgcacttactttttcagagcttcccactctgtttagtatgttgggttctgctctttttttgagacagggtcacgctctgtcacccaggctggagtacagtggcataatctctgcggcactgcaacgctctgctcccgggttcaagcaattctcctgcctcagcctcctgagtagctgggattacagatgtgcaccagcatgcctggctaattattagattttttgtagaaacagggtttcaccatgttggccaggctggcctggaactcctagcatcatgtgatctgcccacctagcattccaaagtgctgggattacagttgtgagccattgtgcccagctgggttctgcttttttgcatttttacatacatattatatatgcagactcacagaactaatatggcattgtggaggtttttcctaaaacaaatggtattgtgacatagccatcattctcagagttgcttattaacagaacattatggagatatatttttcttccatgcctgaaggtctccctcattcattgtaattgatacagagaattctgtagtttgagcatggttgatttagccacccacctcttgagggtagaattaattaagactggttccagtctgttgcttgaaaataaaacactaccctgaaatgcctagaggcagggttgctgggtctaagcccccagacctttcttattcacttgacctgccctcctagctacctggtgttcaatgtcatccccacgctggccgacatcatcattggcatcatctacttcagcatgttcttcaacgcctggtttggcctcattgtgttcctgtgcatgagtctttacctcagtgagtgctgctgggagacaccgtctccctgaactatccagggactcccttggccatgagctgtgcccccactcaagtgacccacctatgggaggctgtggattggtggacttgaatgggctcctagtgctcgtcatgtgatgggcgggtctcttctgtcaaatcaaaccttaacctagctgaggggctggggaaggacattcttgtcacgttaagtctgagccgtggacacaggtcaaggaagcctcgtttgtgtaacaagatgcagcttgctttcatttaccaaaagcgttttctacacatgagactttgtgcaggctgcagaggtgcctccctgtggaatctgggtgtccgggcttgagcataggcttagtgtgtacatggcaggtagtggacattgacatttggtctctgcttttggggatgatgtcctattctgctccccatcctgtcactctccagccctgaccattgtggtcactgagtggagaaccaagtttcgtcgtgctatgaacacacaggagaacgctacccgggcacgagcagtggactctctgctaaacttcgagacggtaacagagggcccggtggcagtggtgtgaggcgtggagatgtggaggagtgtaaccaggaccactggggctgacagagagctgggggtgtgatgtttgtgtgtgatgtttgaactcaggaaggaggattgagagttggggggaatgacccgagtgccatgtgctgtgcccatgccaaataaatttggtttgaattcatcaggtgaagtattacaacgccgagagttacgaagtggaacgctatcgagaggccatcatcaaatatcaggtgaggatgctagtttgaggcctccggagaataatgccctggcctggtagaattttcagggccaagagtgatagtcgagtgttggggtagaaggggcctgggcccaggtttggactcactgatggccattgtgtataggacattcctcttcctgtgttattgccctcagggtttggagtggaagtcgagcgcttcactggttttactaaatcagacccagaacctggtgattgggctcgggctcctcgccggctccctgctttgcgcatactttgtcactgagcagaagctacaggtgaggcaggatcttggatgagagagtggggcacaaggaaaagggggcctgaggcctgtgtctggtcaccaggctcttcggtaggaagtgggcagggtgacacaagaagagcggcctgcaggccccccgtgacatgctctgcttccttgattgccacaggttggggactatgtgctctttggcacctacattatccagctgtacatgcccctcaattggtttggcacctactacaggtaatctgagccctggccctcacctgtccagggcacattattatttcctggctactcagagaagtcctaaccagcacctttttgcaggatgatccagaccaacttcattgacatggagaacatgtttgacttgctgaaagaggagacagaagtgagcgaagggagaggagtagggtttggggagggaggagctgtgtggtgtttctcgtgcttggaaaacacaaagctgagaacctcagcacacatgggtggtgcccttccaggtgaaggaccttcctggagcagggccccttcgctttcagaagggccgtattgagtttgagaacgtgcacttcagctatgccgatgggtgaggccttccttttgcttcctttgcttttccgttcatttgcacactgccttcctgcttctcagtgctctgaatccctgcttttggaaaagagcctgggcaggggaggggcagggcctactagcagctctggtgatggaaggtgcctgctgagcaaccccacctttccttgcaggcgggagactctgcaggacgtgtctttcactgtgatgcctggacagacacttgccctggtgagaggagacccagccacttggcccagatgcctcaagcttccctcattcagtgcccatggtagcttgtgacccaggctgtggagtcagagagcccagtcacgataggcaaccggattgaatggtgcagcctccatggacactggtgacctcttggagagggaacctcaaaagccagtgggcctcggccggctgcggtggcacatgcctgtaatcccagcactttgggaggcttaggtggccagatcacctaaggttaggagttcaagaccagcctgaccaacatggtgaaaccctatctctactaaaaatacaaaaattagccgggcatggtggcgggtgcctataatcccactactagggaggctgaggcaagagaatcgcttgaacctgggaggcagaggttctagtgagctgagatcgcgccattgcactgcagcctgggtgacggagtgagattcggtctcaaaaaaaaagccagtgggcctgagatttttcccatttccaatgcaacaggtgggcccatctggggcagggaagagcacaattttgcgcctgctgtttcgcttctacgacatcagctctggctgcatccgaatagatgggcaggacatttcacaggtagggttgctctggagaagacggtggtttaggggtctacgtgtggaggaatgataagggctggctgtccagagagaggagatgtcacccttgcaaaaaaactagggccattctagcatgatataacctacagtcacacaagtcaagtagtcatgttaaggatttgtatggtgccataaaagctacagagggctgggcgttgctggctcatgctttcagtccatgctctttgggaggcttattcccgtgtctcacctgagtctccggattcatcagctgcttctgctcatcggtcacccccctctgccacgtccccctcgggttccataggcggctatcctccgatactacccccccactttcccctcccgcgtcgcttgccatgctccttgccgacccacagccctcacacccttccgcccccacctctgccaccccactctccccctcgccccaccccccccgcccccccccccacatccctttcgcccaaccccaccccccacacctttcccccaccccccgcccctccccccccctcccctctccccnnnnnnnnnnnnnnnnnnnnnnnnnnnnnnnnnnnnnnnnnnnnnnnnnnnnnnnnnnnnnnnnnnnnnnnnnnnnnnnnnnnnnnnnnnnnnnnnnnnncctgggtctcctcccctccttcctgccttgtgtatgctcaagccgttcctcctgggcactgtccccacctagaacagataccatgaattcaaatctcacaaaacacactttccagttctcaagcccaaacaaggctcttgtgtattcttgaggcctcagccagcagcctgcctccttccattgagggttttgagtggcaggagcagttttacctggaccctctctataggcaacgtcagcgctggatacatctaatgagagggccatccaggcttctctggccaaagtctgtgccaaccgcaccaccatcgtagtggcacacaggtacaggactacaggcctggggcggctggtgatgtggcccgctttgggtggggtagtaggcgactgatctttgacttctcaggctctcaactgtggtcaatgctgaccagatcctcgtcatcaaggatggctgcatcgtggagaggggacggtaagagacacatagatcaaaaggacaggtcttctgaattgggggctccaggaaagggggcatgaagtcccaggggcttctggaggggacctcccttcccatcccgtcctctctgtgggctggtggcaaggaccctcggggtaaaactaatggttaggactcacacttttctcctcaccccagacacgaggctctgttgtcccgaggtggggtgtatgctgacatgtggcagctgcagcagggacaggaagaaacctctgaagacactaagcctcagaccatggaacggtgacaaaagtttggccacttccctctcaaagactaacccagaagggaataagatgtgtctcctttccctggcttatttcatcctggtcttggggtatggtgctagctatggtaagggaaagggacctttccgaaaaacatcttttggggaaataaaaatgtggactgtgcgaggatcactgtggctttgtgggatggggtactgcagcgggcctctacccataagtcagatgagcattcttgacacggctttcctgtttgaggttagagaggagagagaaacacaccacttgtacgttttatcaactgccaagatcctttattttttccaggccccttcctgcccactccacatcggggcagctccagcataagggagatgacatgatgaaggggctaagagtagggcctggccagcatccactgagggcccaaccagggaacagttgctagccgctctcttccatgcagctggagcactagcaaggccttccagaggctcccagggcgacctccacatcactcccgcttgtctctgccctccagggtgctccgggcctcctctccctgtgtaccctagaggtgtgagggccacagtcctcctcaggtgaacctccctccccaagcccagggccctagcacaggctgcagttggacggcttcgagctgcggctctgggcctagagcaaagagaggggaaggaggggaagacacagtgcaacgtcaaggaaatgagggacagccctcatttcagagctcagcatgggctggagtcatactgaaaaccagacgataaccaccattccaaaactctgcaccactaggaagaacccccatccctgacttcttcctcccttccactgcagcatatatcttcagcccagcctcataccctgccgctggtattctgcctcactggctgacagtgcttgtctaaagctaggtcttcttcctcctgacaactgggagggagaaacagtttaagttggatgatggtaagatctgaaatttgaacatctgatctgtgtgtgttgggcctcatggtgctgagcactgctgaggattatctcaatcttcatagcaacactacaaggtgggtattagtattgtccccgttttatagaggaaatgaaggctccatgggttaaataacttgtcaaagatcatatagttcatcttaattttgagaccaagttgccagcgattatcttgcattgtgtcagagtggtcccacctacctgcctccagaccaagcccttgcccacagcttgcgctctctttcacaagagggtaaggtaccttggaacctggggtttggtttctgccagggacatttccagggcccgctgcagagcttcatcctcactctacaaagggagaaagaagaccagcgtccttggacttcactctctgtgtgtttgtttctgtccatccaacctctgcccaactcaccaggccattctgcaaagcaatcactggaggggctgtccaggacggagatcgggttgtggctctacgacagacattgaagaggtggaggtcagaggtgtgaaggggaaaaagggggagcagggaaacgggcaggcctacctgctgggagaggtacaggaaggcatggtttgacttgggctggggacagtgcttgtagaagccacagcttgtgctctggagatggcagcaagtctgtagggaagagagatttttggcatgtctccaagaactagccttacccaggaagtcaggaggggagttctggaaaaacatgcacttgaaaaggaagctaaaagactcccctagccgacagggtagggttgaagctccccaatttataacaacagagcttgagtcagttccaaaagaatgcttcccaaaagcaagtggaggacttggctgccattaccctgcccggctggttggtgcccctccccagagcaatcatggtccagtggatgccggtgcttgatgcagaagtttcggctacagcgttcacaggtcagtttcatcatttctcgtgccggcagccagcgcgttcacacttattggtgaagatctgaggtgaagtgagaaggttgtctctgctgagactctgattagctgtttgggtttccaggcatccgtagtcccagctgggttgtggctgaccccntacaatgtttaccttacgtttttgctgtgctggatcagagcgacagtctctgtcaatgtgctctcccacagcacggtcagggggctcccctctggccacaggcacaggcacattacagagagggcacacaggtacctggatatcctgtagtcaaggagcaagggtcagtctgtggcccactccagtccaacaaatctctggtcctgaaagaacttggatatgacccaccacaaacacgcaaaaaaacagtgtttcccagcactgacagcctcagaaggacaaaagggagaagaaacgtgagacacagatttgggggattctgcacgcattctccatctgcctgctttcaccctgaggatcgccccctcaccttttggtaagcagatccacagtgatgctgggcgtaggcacatggtctgcgcagaagatgcctgagcaggcatcacacttaagcggcagaaaatctgcaaagagttggtcggattgcaggtccagcgggactcgcatgtccttctctctcactcaagtcttccactcgggaaggaaaacgccaccctattttcgacacaccgccccttcccaagcccattatctccttggccaggccacctctgccgctgactaggcccgcctagcttcaagccccgcccgatggcacttgcagtctgggagcccagccttcgcttgcaacttgcggttcaaagtccctgtccgctgggccccgcgctcgcgcgctccgccctcacccaagcgctgacagctcggctccgaacagtgagcgccgaggtccggaaactccatcgccaagccgggcagggtctgctaggagaagcgacgagtgctgagcgtctttagggctcgtgctcgaagtccgcaccgganccccgcactctggcgacatccctgccccgcccattcctctcccccgcccagcccgggttacggaacccccgcgcc

SEQ ID NO: 1716 - protein, 891 aa, Homo sapiens [sequence omitted]

SEQ ID NO: 1717 - DNA, 13483 bp, Homo sapiens
  source
  (1)..(13483)
  CDS (201)..(444)
  CDS (1076)..(1125)
  CDS (1545)..(1747)
  CDS (1842)..(1962)
  CDS (2209)..(2389)
  CDS (2587)..(2676)
  CDS (2751)..(3181)
  CDS (3545)..(3619)
  CDS (4336)..(4399)
  CDS (4600)..(4759)
  CDS (5460)..(5612)
  CDS (6857)..(7020)
  CDS (7540)..(7841)
  CDS (10518)..(10730)
  CDS (11254)..(11325)
  CDS (12094)..(12186)
  CDS (12748)..(12828)
  CDS (13011)..(13283)
ctaccctgtgcctccacccctgcccttcctatgctccaaggcaggcagggaggcgggaggccaggtagctcaggaacccaaacctgtcgggcaggttttgagagctgtggagagagggacagaggctggagaaggatgtatggcctgccctgggcttgtctgttccctcctgagcctgagccccttaccttcctgaccccatgaagcacacactggctctgctggctcccctgctgggcctgggcctggggctggccctgagtcagctggctgcaggggccacagactgcaagttccttggcccggcagagcacctgacattcaccccagcagccagggcccggtggctggcccctcgagttcgtgcgccaggactcctggactccctctatggcaccgtgcgccgcttcctctcggtggtgcagctcaatcctttcccttcaggtgagtgtgcccctcccccatgagggcctcagcatttgggtccccagcccggcttcctctgtcccactctaccatgggatgtgcccaacctacaagcaggcacttgccatcttcctggggtagaaggcggaggatctggggagggctccagaacctgctgtgtgactgtgggtaagcctcacttcctctctgagcctcaggtgctctgtctgtaaagtgaggaggttacattggaaatacattagacctgactcagacatcctcttagtctatcggtgcttgggttgggtggtccaggagtgtctgaaggaccctcccagtcctgtcccttgctgcttgaggggaagaactgccaggccagaccccttctctgcctttgcccaggctcaggactgacctgtagggtccaggaggagaggtctgcagcctcctctctgctcgccctcctgtagcagtgctgaggtcagggcaggatggcacagggctgcggtgatgcagccttctgcgagggtgccatggtggtggcaggagccctgcctcagagccactttgccctggcagtggggagaggagggacacaggggcagggcagtggctgtccccaaatcctcagcttggctctttcccatagagttggtaaaggccctactgaatgagctggcctccgtgaaggtgaatgaggtgagcaagctggggaaaggtgctgggggagggagttctggggtgagcagcagggtgggagcagaaaagccttggctccccttagcccacctcgctgggtgtccactaggcaggggctcaggcatcctctcccctcctctgtgggcgctgcagtccgtagacctgggtgcaaaccacagctctgccatttactggcagtgaggtttgcagggagctggaacttcctgaacttcagcttcctcctgtgtaagatggtgatgagcagtaagaatgcggtcacctctgggacgggttccatgagatgcaggccatgcccctgacggcactcccgccccttctggtttccctctggactcaggcagaagccagggctgggcagtgggggtcgggtcacccctcatgccctgctgcctgcccaggtggtgcggtacgaggcgggctacgtggtatgcgctgtgatcgcgggcctctacctgctgctggtgcccactgccgggctttgcttctgctgctgccgctgccaccggcgctgcgggggacgagtgaagacagagcacaaggcgctggcctgtgagcgcgcggccctcatggtcttcctgctgctgaccaccctcttgctgctgtaaggcgctgcccagggcccgggtagggcgggctgtggcccccaggctccctcttacccagcaagcaccttcctcctccctccattcccacaggattggtgtggtctgtgcctttgtcaccaaccagcgcacgcatgaacagatgggccccagcatcgaggccatgcctgagaccctgctcagcctctggggcctggtctctgatgtcccccaagtgagcactgttacccctcaccctcatgtgcccctgtgagcactgggcccgggcaggacagagccgagtgggccctcgatggcccataaccagcgcatctgaaagccgcctcctctcccgcccttgcctgagagtcgaccaccctcagggtggatgccataggggcagggaaggggccagggagagaagggcgtaaggactgtgggtgaccaggaagggcagcctcagggccttgtgtttgcctaggagctgcaggccgtggcacagcaattctccctgccccaggagcaagtctcagaggagctggatggtgagggtctcggggactggcaggtgggctggctccttccagggcccctgctcgggtgcctcggtgggggcctctcactccctcattctggacacccccgggaacaggctggtagaggtggggatcaggccggctggagagcaagagtggccgccactcagctgctggaggaagaagccgtgtccccgctccttcactcccctccaccccccggctcctgcagagcccggtggggcctggggaggcaggatgggaatggggagggcccctccactcttggggtcccaccctgcagactgccctgtgctctgcaggtgttggtgtgagcattgggagcgcgatccacactcagctcaggagctccgtgtaccccttgctggcggccgtgggcagtttgggccagggtgagctggagccgcatcctggatagtgtggagcccagcgggtgtcctcctggggcgatcccacctgcacctagccctggatttcctgagccacctctgccccacctgtgacttccccatcgctgtaccccaggatccagcccccctcccctggcttaatgtgccctggggcagtttccactgtaggcaggaggtcaatgatttgcaggtccctttggctgggggaggggagttctgcctcctgcaaggcgtctggggatgcatatggtggaccctgctcaggctgggtgtgggtctctcagtcctgcaggtctccgtgcaccacctgcaaaccttgaatgctacagtggtagagctgcaggccgggcagcaggacctggagccagccatccgggaacaccgggaccgcctccttgagctgctgcaggaggccaggtgccagggagattgtgcaggggccctgagctgggcccgcaccctggagctgggtgctgacttcagccaggtgcagacccaggacagagtcctcttaaagccacggagggctagctgcctgctgctcctgggatctggcaaattcccagtccccttgccccaatgttcctcccttgctccacccacccagggttaatgcgggtcatcctggcagtgggtggagtgctccccaggccacgccctgtacgtgaacttcatgtgtgtgagctccttgagttcttgctgccaccaggggcagtaagagccatggcagtcctcattttacacttgaggacattggggttcagaggcccctgcccccctcatccaccctcagggatccccttcaggcctctccatgaactttgtcataacccaccttcccccatttcaggtgccctctgtggaccatgtcctgcaccagctaaaaggtgtccccgaggccaacttctccagcatggtccaggaggtgagagccacctggtctgcctgatttctccctcacctgccaagtgagggcctctgtttcccccttttgggcaggaacccagttgaacctaatatttggggtcccacccaccacacagcaccctgggcaggggactcccgacgaccatccttggtgtgcacacaatctgtgctcagatgggagagctgggcccttcaaggcggcaggcgtctgggggtggcaagggagcagtgctcagtctgagcccagagggcaggcggctcccctgggtggagatgggccaagggggaggatgcggtgttgtgagtcagcgcccaggacccaggacctggagctggggaaatgatgagtcagccatgctgggtggctggagtggaaggttccagaaggaaggaagtcagagctgaggctagaagggtggactggagctggaccttcaggagctagacctggcagttgtgtggagggcggctgagagttcactgcaatggtgggagagggatgggggtaggaagaagaggtccgggaggagcaacgttttgggaagttgagtcagactgggccaggggatgggagaggagggcagcgaccaagagaaaagagggaaactgggagcactgaggggggccctccctctaggcctggtgactttggggtctcccaagaggggacactgggcagagatggggaggcccagcactacttggttcctgcaggagaacagcaccttcaacgcccttccagccctggctgccatgcagacatccagcgtggtgcaaggttaggccacacgggtcagaggcagctgccaggcatggcttcccaccccacccctaccagggaggcttgttgagagaggactggggtggcgggggactgtcttccctctgtggttcccagatgttcttcctgcccgcttgtcttgttcctgggccccagggtgccctccgcatcccacaagtccctgttactttgggcagagctgaagaaggcagtggcccagcagccggaaggggtgaggacactggctgaagggttcccgggcttggaggcagcttcccgctgggcccaggcactgcaggaggtggaggagagcagccgcccctacctgcaggaggtgcagagatacgagacctacaggtgctgggcaccgcagggtgggatggggtggggtggggtgggcagcccagcctctatgccaccctgacaccctgagccccattcccagcctctatcagcccctgactgtactgagcctctgtgttttttgtttgtttgtttgtttttgtttttttcattttttttttttttgagacggtgtcttgctctgtcaccaggctggagtgcagtggggcgatcttgggtcactgcaacctctgcctccccggttcaagcgattctcttgcctcagcctcccaagtagctgggactacaggcgtgcgccaccacgcccagctaatttttgcatttttagtagagacagggtttcaccatgttggccaggattgtctctatctcttgaccttgtgatccaccagccttggcctcccaaagtgctgggattacaggccttagccaccgcgcccggccgcttctgcatatttttaagccaagacccctgactccagaggcctccaagtccctatgaggctgtgtgcccttggaacctgagcctggagaccacacaagagcagtagggcctcaggaagagtctgtatctgcatttctgaagccccagccttggggttagaggccacacccggtcgccacgtcccgcacctgtccatgttggtgccagccacctcctttcttagtgacacccatgtcctctctgtggcaggtggatcgtgggctgcgtgctgtgctccgtggtcctattcgtggtgctctgcaacctgctgggcctcaatctgggcatctggggcctgtctgccagggacgaccccagccacccagaagccaagggcgaggctggagcccgcttcctcatggcgtaagaaagggctgggagaggggaagggtcccctcttatagggctggctgattactctcgctcctgagcatagctcccggtgtggctgccagtgtcagtgtcatcatctgaataaaggggttgaaccagagcaggaatggccaacaaggagctcttccttcctacagcaggggcaactgtagcacctaatgggcactccttaccctgagtcagacacagcctagagtccctaccccagcttccaggcggcccccaccaccaataggcagcagcaccagaggtggaatctgtttgccaaccccagactagacggtctctaaggccaaggctgccacatacagttgtacaggctgttcactgaacaagagtacctggctaagggggtaagtgggggctgaaatccaccccatgttttactttccaagcctcacagcctgacatggggctgtgcctgcctcataagcccttcgagccccctggtctaagatctttactcctcagacctgctgggattctgccctgtcggcaggtcatgcctggtcatgccaggtgacccttttgagtgctgggtcctggagtaggtcacctccatgggccctaggcacagaagtgagcagtcttggctctttgggttttgtttgttttttgttttgtttgttgttgttgtgacagggtcttgctctgtcacccaggatggagtgcagtgacaccatcatggctcactatagcctcaccctcccaggctcaagcgattctcacacctcagcctcccaaacagttgggactacaggcgtgtgccaccacccccagctaatttttaaaattttgtagagacatggtctcacttattgccctggctggtctcatactcctggactcaagctatcctcccacctcaacctgtcctcccacctcaacctcccaaagtgctgggattataggtgtgagcccggatagtcctggctctttgaacaaaacagctgttttctcctctaggctgccagggccagccagggaaccaggaacagggtggggatgaggtgaaggtgaggccgggacagtcaggaatactgggttctccctcctctccaggaggccaagtcctccaagctcctttcctctaaaggctctgtgctggggccaactggctgagcaggctggccctggggtgagggtgggacagagggtatggtcagggcagccagtccctgctgtccctcagtcctgcctctcgcctaccccagaggtgtgggcctcagcttcctctttgctgcacccctcatcctcctggtgttcgccaccttcctggtgggtggcaacgtgcagacgctggtgtgccagagctgggagaacggcgagctctttgaggtaggcctgtctctgctcacaggccctcctggggagagaggtggggggcggtatcagcagagcaggagggttgggggaaagtgggggtcggggggtaaaagggagagagggaggggaggagtgagacagacatggccaaggaaagagacagaaacccgccagtggatggtggagggagagagcacccatgagtccctgagatgctgcccaggccccagggcagggaccctgagagatggcaccctgacccattccctctcatctcctaacactgtctgggagctgggaccctggtgcccggtgagctgcgatgctggactgggttctctgcagaagatcgggctgggcaaccctcctagggattcatgggaagagcccctgtaaggatttggggcccaggggtcaccagagttagaggccaggtgtgagctggggtgaggggatgtttcctacccctggtctgtgctgtgccacagcagcacagggccaggccctaggggaccagggtggccttgcccccaccccgctctgtgcccatttctcactgccccatccccagtttgcagacaccccagggaacctgcccccgtccatgaacctgtcgcaacttcttggcctgaggaagaacatcagcatccaccaagcctatcagtgagtggacagcctgggcagagctgggaccggggaaggaaggaggagggccggtgtccctcaggggacatcagcccccccgccacccccaaggctcatcgtctgcacccctcactcctcctcaggcagtgcaaggaaggggcagcgctctggacagtcctgcagctcaacgactcctacgacctggaggagcacctggatatcaaccaggtgagagaacgttttggaaactgtgaggagccctcctcagatccccctcctctggtctttttgcctctgtggaggcaccgtctctttgaacctaggagacctgagaagtctgtgtgagcgattaaggtgcccaagggcagaggcccagttatcagctctggggaaggttccgggtgtgtaggtgggtccgtgtgcacctgaaggctatgtccagccccaagcacagccaaggtggcagcaggaaaggctggtgacagtgagcaggaggatgagggggcccatgtgtcctgactgaggacaggcattggctgggatgctccacttgggagggggaggctggggaaggacgtggcagtgacaaggatggtggtgagtctggctaacgttggtggagggcctgccaagctcacgcaggtgggaggtggtggtggcaggattccatccccagcctgacaagcctcttcctgtaacctctggagttactggaacttggtgtgtagaactggagacacttgccaatgctggaaagagacagttctagaatgaaggcaaggaagggctgtttcacaagagggatggactttgagaatggggctctcctcatggtgcacagcagctggaagacattcactcctcgacttccacgctcctaagcatatgctggggaaacccacatcccctggccctggttcccctcgccctccccaaacacagagcatgctaactcctgattttgcatcgttctgggaaacccttccaacccctggatccaccaaccagcctcggcccacggacagcacagccggatggcccagccccaactctgtaccttgaactgcacaacctgggacagttatgcagctcactcctccttccgcatctttaaccagacaggagctccccgagcaggcgatatctcagtgctaggctgagacactgccctgtggaggaagcctggccagggagggatgaaccaggggcctgggcagaggagcccccatcctctactggcaggaagccatggctctcgaggggaggagtcctgggctctggtccttggcaggggagggtccagctcacaggagagtctggatagatagggctttggattcagatgcactgggcagtcctctgaggccacctgacaatgtaccaaatgtggctgtaagaatcctcgtcctcaaaggagacactgatgggtaggcagacatgagtaacacacagggctttccagagcacggggagggcaccagccacctttccacttctcctgaagctgctgccactgatgcctgagacacggcccgaaggcccccacccgagagggccaggccttttctcctccaggagaaggcagcctggagggatgcggggaggagagccaagctgggctgcagtctctaaccacctgtgtaacctcggcaagtggacgctccactctgacctcagtttcttatctgttaaacactgggctgacttttatgacctctaaatctcttccagtgatagtaggaaaatgctaaggctctttcctgaaaatacagtttcattcattcattcattcattcattcattcattcattcacacagctaacaaacttgtctcctgcccaccatgtgtgaccctccgagttagatgctgggggtttggggctgaataggcaggcaaagtcccactcttgtggagctgacagcattgaacaattaacccacaaataagatcatttcagagcaacaagtgctttgaaggcctcgacacagctgatgggataaagagcggctgagagagctattttatttcaggtggccagggaaggtctgtgtctctgcccagaagccagatgggcactggaggaaggccaggtcttggcatttggggcaggggcctactgggagcctgtctggggcttggggtgtccagggcagggggccctgagggcctgctgtgtgagtctgttcttgtgttgctataaaggaatacctgaggctggggcatggtggctcatgcctgtaatcccagtactttgggaagctgaggtggaaggattacttgagcctaggagttcaagaacagcctgggcaacatggggagaccctcctctacaattttttttaaaagccaggtgtggtttcttgcacctgtagtcccagctactcgagaggctgaggtggtagaatcactggagcccgggggatctaggcttcagtgagctgtgattgtgctattgccctccagcctgggcaacagagcaagaccctgtccgcttccccaaccaaaaaaaaaaaagcaatacctgaggctgcataatttataaagaaaagaggtttaagtgcaggctgtacaggaagcatggcaccggcagccgtttctggggaggcctcaggaagcttccactcatggccgaaggccaaggggagccagcacatcacatagggagagagggaacgagagagccaacgcagaggtgccacactctttcaaacacgtgaaataactgagcaaaactcactcatcacatggcaatggcactaagccatacgtgagggatccgcccccgtgatctagtacctcccaccaggcccaccttcacccccaacaccggggatcacattgcaacatgaaatttggaggggacaaatatccaaaccatatcgcctggtgacccctgtgcttaggggagcatctctggggtcctggctcagcaactgggcatgactcccaccctgcgcctgctctcccagtataccaacaagctacggcaggagttgcagagcctgaaagtagacacacagagcctggacctgctgagctcagccgcccgccgggacctggaggccctgcagagcagtgggcttcagcgcatccactaccccgacttcctcgttcaggtcagcggtgggcacctcagcagggcttcctcagcaggtggtgatggaacgaaggggcccacagaggagctgggtgtgcatcttgccttgtcccagctctggctcttccacatttcctggggcctcttcctgtggaggtgtccccagatcatgtgcccctgggcctgtcctcctgccaccaccccggtcacacaggaatggacaacctctcccccaacccaacagcatgtgttgctgttcatggtcctgaacccactgctgccgaggacgcattgggaagttgcctcttccttagttacaccagagggtgccttatttgttcttgttgtttctatctcactgggaaaatgtctgaaatatttcacagttccagggaaaactcactgtgactgatgtgtcacaatacacttagctggtgtaggttatatttgataagactggggatttggaggctgggatcaggtggtggtgggccccaggggagctgggttcatccctcctggcctcttctgtccacctgcagatccagaggcccgtggtgaagaccagcatggagcagctggcccaggagctgcaaggactggcccaggcccaagtgagtgggaaacagggccccgactgggcagcaggagccacagggggcttgggaggcgggaaagggtgggaggatgtgagggcaaaggcagggaactgaggacccccaccagtgaggcctgaggctcctgacccctggctgggctggagggttttgcagcatcagttctgactcaagctctgccacccgttggctgtgtggccttgggcaagacatgcagcatctctgagccggaggttcttcatctgttgggtggactgtcctccatctcagagcagatgaaatcacttctctggcctcacgcagttgggcaggtgtttctgtgtgtgccacttgtgggatttgctgggacaggtgctgtgaggacattgggatgaatgagatgtcatggcagttgcccttgaggggaaaaatagcattttgtatttataactatttagggtttaaaagttctctttgaaacatcccataggccccacaacaaccccacagggtgggcagagccagaagcatcctcaatttcagcaggtgcccctgcagctcaggcatgttctgtgactgacttaggggcacccagcaagctagagtgaacctagaatttggatctaggccccccaaaccaagatcaggccctggagcttaaggaggcctcagttttctgcctctgagcccagcactcccactttctcttggtatgtcagactgaaaggctgggtgacgggtagatgggtcctgggcggggccgttctgatttttgtatcctttcaggacaattctgtgctggggcagcggctgcaggaggaggcccaaggactcagaaaccttcaccaggagaaggtcgtcccccagcagagccttgtggtcagtttggaggcccggggagcctggggcctgggggaggggagacgtggagaggggacagtgaaaggggagggaagttctgagagtcccttccctcccctcctctcccctcctctcccctcctctcccctcctctcccctcccctcccctccactcccctccactttcctcccctctcctccctccccttcccttgcactcccctaaccagccctgatctcttctccacaggcaaagctcaacctcagcgtcagggccctggagtcctctgccccgaatctccaggtggctgctgttggtggggacgtatggtggagcacaggggctgcagaggcggggaggaagtaggagcccatctcactctgcacctcagagctctgcccaggttgcaggtggggttgggaggaagatgggggtggcagcagagcctgggggatcaccacccttggcttgtctgttggagctgaaccctctcctgctgagtgtgctgtggtgtgtgttgaattaatgaatggatgcgtgaatgtgggacactgagttgaggctctcgtcccctccagctggagacctcagatgtcctagccaatgtcacctacctgaaaggagagctgcctgcctgggcagccaggatcctgaggaatgtgagtggtgggtgggacagggaaggggcttccaccccaggcttctccagtcccagcttctcactgtggctcccaggaaagctgggcctgtcctcaagttgccaggcatggggggtggcgtgggtggggggcactgctgcttctgggacccctacagctcagacctcctttccttcctgcaggtgagtgagtgtttcctggcccgggagatgggctacttctcccagtacgtggcctgggtgagagaggaggtgagtggggcctcagaagcaatgactgattccctgctccatcggaccagctgttcaccctgctctgccccgcccccgcccccggagccccttgggggtgacccaggccttcaggatcaaacccaaactcccaaacctggcatctgcacccctgcttgctggctgagctctgtccaccccacctctgctgcagcgcttccctgagctgagtgtgagcagggttggcgttctccaaaatgtttcatcacacctggcctgcaggtccttccctgggctggccctttccccagcttgtccaaggccaatcctcaaagcccacctcccgatgcagacccttgctgaacacagcctctgcaagctgtctggatgcccacactagggcaacagtggtctggttttaccct

SEQ ID NO: 1718 - protein, 989 aa, Homo sapiens
MKHTLALLAPLLGLGLGLALSQLAAGATDCKFLGPAEHLTFTPAARARWLAPRVRAPGLLDSLYGTVRRFLSVVQLNPFPSELVKALLNELASVKVNEVVRYEAGYVVCAVIAGLYLLLVPTAGLCFCCCRCHRRCGGRVKTEHKALACERAALMVFLLLTTLLLLIGVVCAFVTNQRTHEQMGPSIEAMPETLLSLWGLVSDVPQELQAVAQQFSLPQEQVSEELDGEGLGDWQVGWLLPGPLLGCLGGGLSLPHSGHPREQAGRGVGVSIGSAIHTQLRSSVYPLLAAVGSLGQALDFLSHLCPTCDFPIAVPQDPAPLPWLNVPWGSFHCRQEVNDLQVPLAGGGEFCLLQGVWGCIWWTLLRLGVGLSVLQVSVHHLQTLNATVVELQAGQQDLEPAIREHRDRLLELLQEARCQGDCAGALSWARTLELGADFSQVPSVDHVLHQLKGVPEANFSSMVQEENSTFNALPALAAMQTSSVVQELKKAVAQQPEGVRTLAEGFPGLEAASRWAQALQEVEESSRPYLQEVQRYETYRWIVGCVLCSVVLFVVLCNLLGLNLGIWGLSARDDPSHPEAKGEAGARFLMAGVGLSFLFAAPLILLVFATFLVGGNVQTLVCQSWENGELFEVGLSLLTGPPGERVCRHPREPAPVHEPVATSWPEEEHQHPPSLSVSGQPGQSWDRGRKEEGRCPSGDISPPATPKAHRLHPSLLLRQCKEGAALWTVLQLNDSYDLEEHLDINQGSISGVLAQQLGMTPTLRLLSQYTNKLRQELQSLKVDTQSLDLLSSAARRDLEALQSSGLQRIHYPDFLVQIQRPVVKTSMEQLAQELQGLAQAQDNSVLGQRLQEEAQGLRNLHQEKVVPQQSLVLETSDVLANVTYLKGELPAWAARILRNVSECFLAREMGYFSQYVAWVREEVSGASEAMTDSLLHRTSCSPCSAPPPPPEPLGGDPGLQDQTQTPKPGICTPACWLSSVHPTSAAALP

SEQ ID NO: 1719 - DNA, 1387 bp, Homo sapiens
  source
  (1)..(1387)
  CDS (201)..(1187)
gttctgtgggaacacagccacatgcattccatcatgggttgtctgtggctgctttgcacagcagcagagttgagggctggaggcggaggcctgaagcattccatacctggcccctacaggacagtgccccaacccccacctactccaactctactgggacacagcaaggcccggagagagggaggggttcctgaggtcccatggagggggtcattggtgggccaagtctcctgcattgccatggctggaaccttggagtcctgagaagagctagctgtgggaaaactcattctgttccctcagcaggctctgtctatccagggaaaagaagtattcattctgacttttcacatgcagtgtcttgttccatccttacacatccctactttatgttttcctccatgcctgcgtggctctccttggttcatgtcagcatcatgtgtagaggacttgccttggttcacactggtgccatgtgtccagggctcactctggtttatgttgacactatgtgtagagcgttcactttggttcatgttggcaccatgtgtagagggctctctctggttcatgttggcaccatgtgtttagggctcatcctggttgatgttggcgccatatgtccggggctcaccctagttcatgttggcattttgtgtacagagctcaccctagttcatgttggcatcgtgtgtacagggctcactttggttcacattggtgccatgtgcacagggctctccctggttcatgttcccaggtggacagggctcaccctggttcatgttcccaggtggacagggctcaccctggttcatgttggcaccatgtgtacagggttcaccctggctgatgttggcgtcatttgtacagggctcaccctggttcatgttggcaccatgtgtacagggttcaccctggctgatgttggcatcatttgtacagggctcaccctggttcatgttattgccatgtggagagggcttgccctggttgatgttgccatgtgcatagggctccccctggttgatgttggtgtcatgtgtagaggactcccctggttcatgttggctccatgtttagtgggcttattctggttcatttggccccatgtgaaaagggctcaccccaggttaatgttggtcacatatagagagggcattctctctgtgtccacgataaagtaatggtggtggtgtctcccatttcccagaggaagctgagactcagctgaggaaagggcttggtcatagtctcaacgctggtccataatatggtcaggatttacaaccctgagcgtgatgtcatcttctcacacctgaaaccgtttagctaaccagaaatactctctcctaaggagataaagtgactttcattacatgtcttt

SEQ ID NO: 1720 - protein, 328 aa, Homo sapiens [sequence omitted]

SEQ ID NO: 1721 - DNA, 1348 bp, Homo sapiens
  source
  (1)..(1348)
  CDS (201)..(1148)
  modified_base (888)..(888): a, t, c, g, unknown or other
  modified_base (949)..(1048): a, t, c, g, unknown or other
agcatctacaatgtgccaattgataggctgactgtgacaaatctagtgacaagagaaaactcggtactaaagccagggcagatggaaaagctgtaactggagattgtacactagaacccaggagttcgagaccagcctgggcaacatggcaagaccctgtctctacaaaaaatacaaaaattagctggacatggtagtgcatgcctatagtcccaggtgctcaggaggctaatttgggaggaatgcctgagcccaggaggtccaaggctgccgcgcgctgttcctgcccctttttcccccgggcccttccctctcttcttgtgggttgcccctctcttccttttgttctgcgccccctcttgtcgccccccgtgccccctcgtcgggtgctgtctttccttctttcttccgttttgttctcctttcccccttccctcccttcccctcttcctcccttttttgtcccctctttctgtctctgttgttcctcttgttgccgtgtttggttcccctgtcgctgcttctgctgctgtcggttcgcgttgttcgctttctccgcgtgtcgtcttgttgttccgtgtttcctctctccttcctcccccgccttcggcccgctccctccgtctgcccctcgcttggttgcctttttggctggctccgcccccctcttgttttttctcccttttcccttctttcccgttcctgtttctctcggttgttctttttccttgtctctcctcttctttcggctgctgttccttttctttttctctgccttccccttccctttgcgctcctccctctcttcccgccgttcgccccttgttgctttgggttgtggcccgtcctccgttccccttctttcccttcttctttcctccctgtctngctgctccccgcggctgcgttcctcccctcttctctatgtacaacacgaagagaaaaaaannnnnnnnnnnnnnnnnnnnnnnnnnnnnnnnnnnnnnnnnnnnnnnnnnnnnnnnnnnnnnnnnnnnnnnnnnnnnnnnnnnnnnnnnnnnnnnnnnnnccggatggcaggaggttcacaccctaatccagctctttgggaggctgagttgggaggatcacttgagcccaggagttcgagaccagcctgggcaacatagtgagaccaccatctttacaaaaaataaaaaattgaggtgaacgtggtggctcgagccacctgcagtcccagctgcttgggaggctttttaggaggattgcttgagctgaggatgttgaggctgcaatgagctgtgattgtgtcactgaactccagcctgggtgacagagtggaaaaaaacttttttaatgctgcagtgag

SEQ ID NO: 1722 - protein, 315 aa, Homo sapiens
  MOD_RES (230)..(230): Variable amino acid
  MOD_RES (250)..(283): Variable amino acid
MPIVPGAQEANLGGMPEPRRSKAAARCSCPFFPRALPSLLVGCPSLPFVLRPLLSPPVPPRRVLSFLLSSVLFSFPPSLPSPLPPFFVPSFCLCCSSCCRVWFPCRCFCCCRFALFAFSACRLVVPCFLSPSSPAFGPLPPSAPRLVAFLAGSAPLLFFLPFPFFPVPVSLGCSFSLSLLFFRLLFLFFFSAFPFPLRSSLSSRRSPLVALGCGPSSVPLLSLLLSSLSXCSPRLRSSPLLYVQHEEKKXXXXXXXXXXXXXXXXXXXXXXXXXXXXXXXXXXRMAGGSHPNPALWEAELGGSLEPRSSRPAWAT

SEQ ID NO: 1723 - DNA, 1534 bp, Homo sapiens
  source
  (1)..(1534)
  CDS (201)..(1334)
gctgcctattaattgattctcttattgatttatttaatttttaggagcggctgctcggaggcacgggtcttctcctaaacctgcagcgacgcccccggcgtgggcacaaaggctccgacggcggccggcgggggctgcccagcgcccgggagccggcgccagaggtcgcctgcgcgcgccctagccgagccccgggcaccatgccgcggcgcctgcagccccggggcgcgggcacaaaaggccctccggccccggccccggcagcttcgggggccgcccggaactcccactctgccgcctcccgggaccccccagcgtctgccaagccgctgctgcgctgggacgaggtgcccgacgacttcgtggagtgcttcatcctgtcgggctaccggcgtctgccgtgcacggcccaggagtgcctagcctcggtgctgaagcctaccaacgagacgctcaacttctggacgcacttcatcccgctgctgctgttcctgagcaagttctgccgtctgttcttcctgagcggcggcgacgtgcccttccaccacccgtggctgctaccgttgtggtgctacgcgtcgggagtgctgctgaccttcgccatgagctgcacggcgcacgtgttcagctgcctgtcgctgcgtctgcgcgccgccttcttctacctggactacgcgtccatcagctactacggcttcggcagcacggtggcctactactactacctgttgccaggcctcagcttgctggatgccagagtcatgactccatacttgcagcagcgcctgggctggcacgtggactgcacgcgccttatcgccgcctaccgcgccctggtgctgcctgtggccttcgtgctggcggtggcttgcactgtggcctgctgcaagagccgtaccgactggtgtacctacccgttcgcgctgcgcaccttcgtcttcgtcatgccgctcagcatggcctgccccattatgctcgagagctggctcttcgacctgcgtggggagaaccccacactcttcgtgcacttctaccgccgctacttctggctggtggtggccgccttcttcaacgtgagcaagatccccgagcgcatccagccgggtcttttcgacattatcggccacagccaccagctcttccacatcttcaccttcctcagcatctacgaccaggtgtactacgtagaagagggcctgcgccagttcctccaggcgccgcctgccgcacccactttctcgggtactgtgggctacatgctgctgctggtggtctgcctggggctggtaatcaggaagttcctaaacagctccgaattctgcagtaaaaagtgagcctccgccttggaggagactactggttcgcccatctgtttggagtttctgttgttgctattgttggtttgttttcaaatttcattgtgttttcttctttgctcaaggaaggtgctgcaaaaccatagggaaaaagttcactgctacaaagggatcccaacccactggaggctttgaagtagggaggttggcaggggtgg

SEQ ID NO: 1724 - protein, 377 aa, Homo sapiens
MPRRLQPRGAGTKGPPAPAPAASGAARNSHSAASRDPPASAKPLLRWDEVPDDFVECFILSGYRRLPCTAQECLASVLKPTNETLNFWTHFIPLLLFLSKFCRLFFLSGGDVPFHHPWLLPLWCYASGVLLTFAMSCTAHVFSCLSLRLRAAFFYLDYASISYYGFGSTVAYYYYLLPGLSLLDARVMTPYLQQRLGWHVDCTRLIAAYRALVLPVAFVLAVACTVACCKSRTDWCTYPFALRTFVFVMPLSMACPIMLESWLFDLRGENPTLFVHFYRRYFWLVVAAFFNVSKIPERIQPGLFDIIGHSHQLFHIFTFLSIYDQVYYVEEGLRQFLQAPPAAPTFSGTVGYMLLLVVCLGLVIRKFLNSSEFCSKK

SEQ ID NO: 1725 - DNA, 1663 bp, Homo sapiens
  source
  (1)..(1663)
  CDS (201)..(1463)
  modified_base (294)..(294): a, t, c, g, unknown or other
  modified_base (324)..(335): a, t, c, g, unknown or other
  modified_base (340)..(342): a, t, c, g, unknown or other
  modified_base (356)..(356): a, t, c, g, unknown or other
  modified_base (380)..(380): a, t, c, g, unknown or other
  modified_base (382)..(383): a, t, c, g, unknown or other
  modified_base (425)..(427): a, t, c, g, unknown or other
  modified_base (444)..(445): a, t, c, g, unknown or other
  modified_base (468)..(468): a, t, c, g, unknown or other
  modified_base (479)..(479): a, t, c, g, unknown or other
  modified_base (505)..(505): a, t, c, g, unknown or other
  modified_base (518)..(519): a, t, c, g, unknown or other
  modified_base (523)..(523): a, t, c, g, unknown or other
  modified_base (610)..(610): a, t, c, g, unknown or other
  modified_base (629)..(629): a, t, c, g, unknown or other
  modified_base (647)..(647): a, t, c, g, unknown or other
  modified_base (847)..(847): a, t, c, g, unknown or other
  modified_base (849)..(850): a, t, c, g, unknown or other
  modified_base (898)..(898): a, t, c, g, unknown or other
  modified_base (906)..(906): a, t, c, g, unknown or other
  modified_base (1079)..(1079): a, t, c, g, unknown or other
  modified_base (1156)..(1156): a, t, c, g, unknown or other
  modified_base (1229)..(1229): a, t, c, g, unknown or other
  modified_base (1244)..(1244): a, t, c, g, unknown or other
  modified_base (1271)..(1370): a, t, c, g, unknown or other
gaaaagattgtcagttagggatttggtgcctatcaatgatgagattttcaatgttttacagtgaaaaatataaaacttttttttggacaatttagggaggtgtttttttttttctcctacacaactaaataactataattacaagattgttttccccactaagattatgtcttttggtgttaaatatatttttaaatgagatgacattaatggtatttgctaggctattttgttcatgtctttacttggcaaaaataaatactggcaaccttatgctggttcaaaaaggtgtanggtgtgtgtgtgtgtgtgtgtgtgtgtgtnnnnnnnnnnnnaattnnnttttggtttggggnggttttttttttttgtttttggtntnntttttgtgttgtttgggttctttgcttttttgttttttttgnnntttctgtgtgtctttgnngttttgggtttgtgttttgtgtntcttttgtgtnggggtgggtttttctttttcttgggnggttttttttttnntctncctttttgcttttctctggtgtcttctctgtcctcccccctgttgcgttctcgtctcttcttctccgctctttttctattctctggntttgtgttgttctcttctnctcccccgcctctcctcntctttctctcctcttcttcccctgtgtcgggttctcctctctctctcctctcgttcttccttgtgggcgtggtgtcttcttttttttcctctttctcctctttctcgtgggtttttcttcttcccctccttgtctctcctttcgctgctcccttcctgcttcttctgcgtgttccctctctctcctcttcctcggggggncnntctgtgtttcctctctcttctgggggggggggcgccctttttctttcncccgctcnttttttcccctctccttcataacgtcctctttttcggctgtgggctcccttccttttcttgctcttttctcccgccctctttctccttcctcctttctgcttggtccctcgtcttttctcatttctctttctcctccgttgctcctccttctttcttcctggttcttgttccnccctctgcttgctcttttgtctctgtggtttctcttttcgcgttttgtctccttttttctttcgttccccccccttngtgcctttttctcctgtccttctcctacttacttgtgtgggggtgctcttcccttccttcctccttttttctnctcctgcctccttcnttctgtcgtctctccctctattcctcnnnnnnnnnnnnnnnnnnnnnnnnnnnnnnnnnnnnnnnnnnnnnnnnnnnnnnnnnnnnnnnnnnnnnnnnnnnnnnnnnnnnnnnnnnnnnnnnnnnncgggggggaaaaaaaccccccccggtgtgtacccctagtgtgtcccccgggttgaaaaaaaggggccacaccaaaaaatttcctattttgtaaaaaagggggtgcccacaaattttccggccccccgttttgggggggtttttaaaaaatgggcccccccggggttgttccccggggggtcaaaggggtttttttggcccctttgggttatcccaaaggggaaagttgtgggattaaaagggggggcggtttttattaagagtttttttattgttcaaaattgtttaaggaat

SEQ ID NO: 1726 - protein, 420 aa, Homo sapiens
  MOD_RES (32)..(32): Variable amino acid
  MOD_RES (42)..(45): Variable amino acid
  MOD_RES (47)..(48): Variable amino acid
  MOD_RES (61)..(61): Variable amino acid
  MOD_RES (75)..(76): Variable amino acid
  MOD_RES (82)..(82): Variable amino acid
  MOD_RES (90)..(90): Variable amino acid
  MOD_RES (102)..(102): Variable amino acid
  MOD_RES (106)..(108): Variable amino acid
  MOD_RES (137)..(137): Variable amino acid
  MOD_RES (216)..(217): Variable amino acid
  MOD_RES (233)..(233): Variable amino acid
  MOD_RES (236)..(236): Variable amino acid
  MOD_RES (319)..(319): Variable amino acid
  MOD_RES (358)..(390): Variable amino acid
MTLMVFARLFCSCLYLAKINTGNLMLVQKGVXCVCVCVCVCXXXXNXXLVWGGFFFLFLVXFLCCLGSLLFCFFXXFCVSLXFWVCVLCXFCVGVGFSFSWXVFFXXXLFAFLWCLLCPPPCCVLVSSSPLFFYSLXLCCSLLLPRLSSSFSPLLPLCRVLLSLSSRSSLWAWCLLFFPLSPLSRGFFFFPSLSLLSLLPSCFFCVFPLSPLPRGXXLCFLSLLGGGAPFFFXPLXFSPLLHNVLFFGCGLPSFSCSFLPPSFSFLLSAWSLVFSHFSFSSVAPPSFFLVLVPPSACSFVSVVSLFAFCLLFSFVPPPXCLFLLSFSYLLVWGCSSLPSSFFLLLPPSFCRLSLYSSXXXXXXXXXXXXXXXXXXXXXXXXXXXXXXXXXRGGKKPPPVCTPSVSPGLKKRGHTKKFPIL

SEQ ID NO: 1727 - DNA, 1321 bp, Homo sapiens
  source
  (1)..(1321)
  CDS (201)..(1121)
cactttctttctttcttcctttcttttttaaacaaaatggggatggaggctggaggagtccaggccagcactctgcaacctcagagacattagccctgggggggtcctccagggagtgcaaccatcagactgagccagccccagaccagctgcgcccaccccacccacttctgcacttgcggttccagcacggacaatggatgggggagtggggatgggggtggggctggcttttctttcttgtctgtctgttgggtggtgccgtcgctcgtgctcgtgcctgtgcgcggtgttcgctggcgtttcgcgtcctttgctgggtgttgttgcttctgtgttgctttatgcttttgctcggtgttctcttctggtgttcgtggtattctttgttgttgcgtgttgtatgttgtggtttttggtttgagtgtgtgttcttgtgttggcgttttcgtcttcctgtctgtttgtcgtctttcgtgtttgtctgtgtgtcttctttgtcgtgtgctgtgttgtccttgtttgcttgctgttctgtcttctattgctttggttgttgtctcgtgggttgtgtcctcttggatgctccttcatttctttcgtttgtgtctctttgttttgttgtgtttctctttcctgtgttttttgttcgtgttgctgggtgttgccttgtctttggagtgtgtgggttgctttgttctttgttgtgtttggtgttgttcatagctttgggggcttttggctgtgtctgtatacattttgtcactgtctgtctgtttattgcgtttctttcctgtttgacatttttgttcttttgtgtgttgtttcttttccaggggttggttgctgtgctggttctgtgcgtgtgtgccattcttgcgtgtcctgttgtttctgttcctcctcttttctcctcttgtttgtcatttggtcgtgttctcttgtctttgtttctttgtctttgttttttgttgttttttgtagttttgggttctggtcacaatagagtttcaagtgagcccgttgcacacctggcagccacaatgcaagatcggggtggaacgctggggaggacctctttcttccccaaggggcctgccactgagacccctgaattataactggaagcaaggaacatgtggggagaggagggaggtatctttgagaaaataggcactgtcctgatgaccctctcagctactccctccagaaccactcatgggggagggggcagaagttttttttatataggtgtatgtatatattttgtaagctctgagttgtcaatgagacattttctaccaagtatatatatatatat

SEQ ID NO: 1728 - protein, 306 aa, Homo sapiens
MGEWGWGWGWLFFLVCLLGGAVARARACARCSLAFRVLCWVLLLLCCFMLLLGVLFWCSWYSLLLRVVCCGFWFECVFLCWRFRLPVCLSSFVFVCVSSLSCAVLSLFACCSVFYCFGCCLVGCVLLDAPSFLSFVSLCFVVFLFPVFFVRVAGCCLVFGVCGLLCSLLCLVLFIALGAFGCVCIHFVTVCLFIAFLSCLTFLFFCVLFLFQGLVAVLVLCVCAILACPVVSVPPLFSSCLSFGRVLLSLFLCLCFLLFFVVLGSGHNRVSSEPVAHLAATMQDRGGTLGRTSFFPKGPATETPEL

SEQ ID NO: 1729 - DNA, 1225 bp, Homo sapiens
  source
  (1)..(1225)
  CDS (201)..(1025)
  modified_base (90)..(189): a, t, c, g, unknown or other
tggttctgttgttctctggggggggggaaaacaagaccgggaggacattttttgcggtgctccgggggaattatttttacacaagtgtcnnnnnnnnnnnnnnnnnnnnnnnnnnnnnnnnnnnnnnnnnnnnnnnnnnnnnnnnnnnnnnnnnnnnnnnnnnnnnnnnnnnnnnnnnnnnnnnnnnnngttatactgagatgcctctattctctgattctctactctctccgtatctccctcctcccttcgtgctcgctcttcgtcttcttcttctttctcctctctcttttctttctcttgctctatccacttcgtctccatctcttcgtgtgctctgcctatgctcctggtcaccctctgattgttctgactcgcctcctcttcctccacctctctctcgttcgctgtcctccccactctattctgcgctcgctcttcctctctacgctttcattcatactttgctgactcatttgcttgtcctctctttcctctttctctttcctgctcttctgcgtgtccactctgcgtacctccttccgtcgcttcttctagtctcgatctcacatctatgcacacgtcctcttctgactctcccaccgccctcctacctcttctacatctcgtgtcttcatgcctatctatgcccctccttcgtgctgctctttctgcctttaacgttcctcctgcctcctctggccctccgccctctcgcccttatccgtctctatcctcgttctccccgttccactctacccgttctgattcttctcgtcatacttctccacactcatctccttacagcctgccgtccccccgcccgatacccactcctaacaccaatccccacctctctgctgttactcctcacttactctaattatctaccacactctctgtcgtatttctacatccactctctcactctttacctccccccccacctacttctctctctctcttttcgacactatctactcatctcccgtcccatgtgtttcgtgtttatgttgatttgttagtgtgtgtctttttctttctgttcttgtttcttgatgtcaggttgtgtggtgattgtcttgtgttttgctaaggtggcgttgttgtcatcggttttttgttttcctttctagtttgtgcttttatttcgtgctcgatgctgttgatttggtctttagggaagatatgtggccgttgtagagttcgtatttaagagtgtgtt

SEQ ID NO: 1730 - protein, 274 aa, Homo sapiens
MPLFSDSLLSPYLPPPFVLALRLLLLSPLSFLSLALSTSSPSLRVLCLCSWSPSDCSDSPPLPPPLSRSLSSPLYSALALPLYAFIHTLLTHLLVLSFLFLFPALLRVHSAYLLPSLLLVSISHLCTRPLLTLPPPSYLFYISCLHAYLCPSFVLLFLPLTFLLPPLALRPLALIRLYPRSPRSTLPVLILLVILLHTHLLTACRPPARYPLLTPIPTSLLLLLTYSNYLPHSLSYFYIHSLTLYLPPHLLLSLSFRHYLLISRPMCFVFMLIC

SEQ ID NO: 1731 - DNA, 1366 bp, Homo sapiens
  source
  (1)..(1366)
  CDS (201)..(1166)
attagaaaccaaatccttccaacatttgcatctctagatgtagagctaagaattctgaaataaacaaatgcagtgaatttggaaatgatacatcaattgcttcctcctatgacatcaatactgggagttatcaagagtctgcccatcaaatgctagggagatgttttcctccagacaccaaagagaagcaacagctcagaatgactaaactctgcgatcctgcagaaagtgaattgtcgccatttctcatcaccttaattttagcagttttacttgctgaatacctcattggtatcattgcaaatggtttcatcatggctatacatgcagctgaatgggttcaaaataaggcagtttccacaagtggcaggatcctggttttcctgagtgtatccagaatagctctccaaagcctcatgatgttagaaattaccatcagctcaacctccctaagtttttattctgaagacgctgtatattatgcattcaaaataagttttatattcttaaatttttgtagcctgtggtttgctgcctggctcagtttcttctactttgtgaagattgccaatttctcctacccccttttcctcaaactgaggtggagaattactggattgataccctggcttctgtggctgtccgtgtttatttccttcagtcacagcatgttctgcatcaacatctgcactgtgtattgtaacaattctttccctatccactcctccaactccactaagaaaacatacttgtctgagatcaatgtggtcggtctggcttttttctttaacctggggattgtgactcctctgatcatgttcatcctgacagccaccctgctgatcctctctctcaagagacacaccctacacatgggaagcaatgccacagggtccaacgaccccagcatggaggctcacatgggggccatcaaagctatcagctactttctcattctctacattttcaatgcagttgctctgtttatctacctgtccaacatgtttgacatcaacagtctgtggaataatttgtgccagatcatcatggctgcctaccctgccagccactcaattctactgattcaagataaccctgggctgagaagagcctggaagcggcttcagcttcgacttcatctttacccaaaagagtggactctgtgaccagcacccaagaagaccacaggacctggccttaccagctctgccattccctcacctagacctctcttttctctcttcttttcttctccaaccctcatctgacccttttcgcctgatgtggctttttatataggaaattgatcatttcttttttgcttcatgggtacaatcttagtggtactgtcatattctttacctga

SEQ ID NO: 1732 - protein, 321 aa, Homo sapiens
MTKLCDPAESELSPFLITLILAVLLAEYLIGIIANGFIMAIHAAEWVQNKAVSTSGRILVFLSVSRIALQSLMMLEITISSTSLSFYSEDAVYYAFKISFIFLNFCSLWFAAWLSFFYFVKIANFSYPLFLKLRWRITGLIPWLLWLSVFISFSHSMFCINICTVYCNNSFPIHSSNSTKKTYLSEINVVGLAFFFNLGIVTPLIMFILTATLLILSLKRHTLHMGSNATGSNDPSMEAHMGAIKAISYFLILYIFNAVALFIYLSNMFDINSLWNNLCQIIMAAYPASHSILLIQDNPGLRRAWKRLQLRLHLYPKEWTL

SEQ ID NO: 1733 - DNA, 1372 bp, Homo sapiens
  source
  (1)..(1372)
  CDS (201)..(1172)
gagacagacccagtaaccagatcctctcattatttgcatgtgaagcctctaacttgtagtcatgtgataaacaaatggagaaaaattggaaataaccattaatgagggcggcagaaattataacattgagcaagggtcagaagattgcagagcagttacccattcttggcgcagaaacctgaaagtcaggatcaaagagaatggcaacggtgaacacagatgccacagataaagacatatccaagttcaaggtcaccttcactttggtggtctccggaatagagtgcatcactggcatccttgggagtggcttcatcacggccatctatggggctgagtgggccaggggcaaaacactccccactggtgaccgcattatgttgatgctgagcttttccaggctcttgctacagatttggatgatgctggagaacattttcagtctgctattccgaattgtttataaccaaaactcagtgtatatcctcttcaaagtcatcactgtctttctgaaccattccaatctctggtttgctgcctggctcaaagtcttctattgtcttagaattgcaaacttcaatcatcctttgttcttcctgatgaagaggaaaatcatagtgctgatgccttggcttctcaggctgtcagtgttggtttccttaagcttcagctttcctctctcgagagatgtcttcaatgtgtatgtgaatagctccattcctatcccctcctccaactccacggagaagaagtacttctctgagaccaatatggtcaacctggtatttttctataacatggggatcttcgttcctctgatcatgttcatcctggcagccaccctgctgatcctctctctcaagagacacaccctacacatgggaagcaatgccacagggtccagggaccccagcatgaaggctcacataggggccatcaaagccaccagctactttctcatcctctacattttcaatgcaattgctctatttctttccacgtccaacatctttgacacttacagttcctggaatattttgtgcaagatcatcatggctgcctaccctgccggccactcagtacaactgatcttgggcaaccctgggctgagaagagcctggaagcggtttcagcaccaagttcctctttacctaaaagggcagactctgtgactggaactcacggagttctgcgggacctggtccaaccacttctgcctttgcctcaggtagaactctctcctcacccgtctcttctctcccaaacctgctctgacacttctcagataacgtgatccttttataaatatgaagctgaatttttaacttgagattctaaacagaagtaactaagaaacctgaagatggacttt

SEQ ID NO: 1734 - protein, 323 aa, Homo sapiens
MATVNTDATDKDISKFKVTFTLVVSGIECITGILGSGFITAIYGAEWARGKTLPTGDRIMLMLSFSRLLLQIWMMLENIFSLLFRIVYNQNSVYILFKVITVFLNHSNLWFAAWLKVFYCLRIANFNHPLFFLMKRKIIVLMPWLLRLSVLVSLSFSFPLSRDVFNVYVNSSIPIPSSNSTEKKYFSETNMVNLVFFYNMGIFVPLIMFILAATLLILSLKRHTLHMGSNATGSRDPSMKAHIGAIKATSYFLILYIFNAIALFLSTSNIFDTYSSWNILCKIIMAAYPAGHSVQLILGNPGLRRAWKRFQHQVPLYLKGQTL

SEQ ID NO: 1735 - DNA, 1909 bp, Homo sapiens
  source
  (1)..(1909)
  CDS (201)..(790)
  CDS (1025)..(1212)
  CDS (1270)..(1709)
gaagcatcaagcagaagaagcagctgcttggaagtgacaaacagaggaaagttctcgtccctcaggtcctggagtttgtgaatgttggggtccagtggtttgtaatgactagtggccttggtggacttggaaagctcaatgaaattcctttgtacctcctggcacagcacatggttcttggtcacaaagatctgatgtaaatgctccagctggtggggatgttctggtgcacatacttctgcagcttggccgtcccctgctggctccacaccggctcctcctgcgcaggcttcatactcctgctcatctatgctttctactgtttccacttcaatagaatcttcctcttcctcgtcctcttcctcctcctcttcctccccacctggactctcttttccgggttccacttccaaccttctcttcagccagacctgtttggccagcaatgggcttcctgcctgctcagctttttcccagtaaacgtggaatttcttccacaatctgtacaagcagcaggttgtcttcccagtgccacttcgcccaataaggatgatgggctccagtggcctgggattgaggtcgatcaccgcgtactcaagctcacccacccggaaggggtactccactgtggctgtcgtgtcattgaggatgttaaaggccatgttggtgctgaagctgtggaacttcatgatgttatattctgtctccactgcactggctgggggaaagtactcaggattgacatgctccctgcccttctcggcctctgtgtcctccacatagcagcgaggtatacgcttttgaattttcatgttagctgacacttggcctttattgatacctttcagcttcttccgcaggacacaggacaagccccggttgtaggcattgcagatggccttgatggaatcagccagtttgcagtgatctaagacgatgtcccaaatccggatgatttccgtgtagatccgccctgatttctccattgcacacgtgttctgctccgtggcaatgatcttctcagggttctcactgcatcgaggggagaagtcaatggcgagctcccagagcatccgggctcctttgtccagcttagcttcgaagagctggatgcttcctttcaggtgcttcagtcgcttctgcaggccctgggtccactcgccatttcccagctgctgaatggcaaggatgattttcttcttgatgaccttggtcattaccttactagacagcttcttcagcatttctgaagtgcactcgatctcccaggtcatgttatcgaagtcctggaggcaggcctcaatctcctgcgtgctccagtcatcctgatcatcattgccctccttccccctgttatcatcaggcacaagctgcaaggccccaaggcccacctgagcatgtccttcccccacctcactacagtcaggggcccctgcacccagagtcggcttgtcatctttctttccttctttgccagctcctgcctccagaggctcagagctctgaagacagtcctctgggaaagacggatccacttcaacctgctgaatcaaaactgtgatgtcctgcataaggcagtctctcagcgagcagggcctgagagctccaggctccttcctggtcacctgggtacctgggagagtctcccagctgtcagggactgcacttccttcaggcagtgttctggcagtggcaccacatggcactgacttgaatgaaccctgggacttgagctgagatgtgtgaccaggggcagtggactttgagagcttccccaggtgggcagcagagtcctgccggctcctcctcctgttctccatcagagctttgttccaggccaagagcagagagtcgttcttcttaatccggtgccgtgcatctttgccctctttgttcttcagattgaagt

SEQ ID NO: 1736 - protein, 405 aa, Homo sapiens
MLQLVGMFWCTYFCSLAVPCWLHTGSSCAGFILLLIYAFYCFHFNRIFLFLVLFLLLFLPTWTLFSGFHFQPSLQPDLFGQQWASCLLSFFPVNVEFLPQSVQAAGCLPSATSPNKDDGLQWPGIEVDHRVLKLTHPEGVLHCGCRVIEDVKGHVGAEAVELHDVIFCLHCTGWGKVLRIDMLPALLGLCVLHIAARVLTASRGEVNGELPEHPGSFVQLSFEELDASFQVLQSLLQALGPLAISQLLNGKDDFLLDDLGHVIEVLEAGLNLLRAPVILIIIALLPPVIIRHKLQGPKAHLSMSFPHLTTVRGPCTQSRLVIFLSFFASSCLQRLRALKTVLWERRIHFNLLNQNCDVLHKAVSQRAGPESSRLLPGHLGTWESLPAVRDCTSFRQCSGSGTTWH

SEQ ID NO: 1737 - DNA, 1702 bp, Homo sapiens
  source
  (1)..(1702)
  CDS (201)..(1502)
aagccttcatttccctctcacgtgtaatcaatagtttgaaggggcatagccagcattcgaggtccaagaatttcttcttagagtttgaaagcagcgctcccttcccttattgctgctgggaagcctgaagacatattctgattctcctaagctatcgtttacagtgttctcagtctccctgagttctgatcctcaaagggatggccctggaagtgggtaggctttccaccattgcgccgggcactgtagtttcttttcatctgcaaagtttgattcttcaggtcagaaacattttgaatattttatttcctccattttctttgttgaactcctcatatctgtgtgctgaggcctctttgaggaggttagctttgtttgtttgtttatttatttatttatttatttattttgagatggagtctcactctgtcacccaggctggagtgcagtggcatgatctctgctcactacaagctctgccttccgggttcaagctattctcctgcctcagcctcccgagtagctgggattacaggcacgtgccaccacgcccggctaatttttgtatttttagtagagacgggtttcaccatgttggccagcttggtctcaaactcctgacctcaagtgatcagcctgccttggcctcccaaagtgctgggattaacaggtgtgagccaccacgcccagccgaggttatctctttttctcacctattttctttgggattctctttgatattttttgttctacttcctgagaaatttcctcaaccgtatcttccaatctttgcagagatctttatttttgcaatcatgcttctaatttccatggtttccttagagtctccacgtgtttccttggctatgttttccatattctcttatctctatgcagatatccattatccgagttttgaaaacggtattccacctggcactgtagctaaaggttgcagcttcttttccttcctctttgcttgtttgcttgtttttgtcttggtcttttccacagcagggctgtccttgagtgtctggcattctgggctgtctgcttctatctcagcagctgcctggaatctctgtgtgcctgtggcagagtggggatgcgtgtcaaactgccagcttcccagttggatgctttggtggagcagtaccttttttttttttttttttttgagatggagtctcactgtcgcccaggctggagtgcagtggtgtaatcttggctcactgcaacttccacctcccatgttcaagccattctcctccctctcagcctcccgagtagctatgattctaggtgcatgccaccatgcctggataatttttgtgtttttagcaacgacagggtttcgccgtgttggccaggctggtctcaaactcctgaccactggtaatccgcccgccttggtctcccaaagtgctgggattacaggggtaagccaccgtgtctggccgatggagcagtatctcgagggacctccaagtgtccaaacctaggtcttttctctccagctggccagtttcccagtgagggggcctttaaccttccccggggtgtgggtgggttgggtgtgacctgttctcagttggctgcctgccgccaggtcttcctggggtcccggtccccgcagcctctcgcacaatccctggggaatgaacctcccgccttctgcagggctgggagagggatgcttgct

SEQ ID NO: 1738 - protein, 433 aa, Homo sapiens
MALEVGRLSTIAPGTVVSFHLQSLILQVRNILNILFPPFSLLNSSYLCAEASLRRLALFVCLFIYLFIYFEMESHSVTQAGVQWHDLCSLQALPSGFKLFSCLSLPSSWDYRHVPPRPANFCIFSRDGFHHVGQLGLKLLTSSDQPALASQSAGINRCEPPRPAEVISFSHLFSLGFSLIFFVLLPEKFPQPYLPIFAEIFIFAIMLLISMVSLESPRVSLAMFSIFSYLYADIHYPSFENGIPPGTVAKGCSFFSFLFACLLVFVLVFSTAGLSLSVWHSGLSASISAAAWNLCVPVAEWGCVSNCQLPSWMLWWSSTFFFFFFLRWSLTVAQAGVQWCNLGSLQLPPPMFKPFSSLSASRVAMILGACHHAWIIFVFLATTGFRRVGQAGLKLLTTGNPPALVSQSAGITGVSHRVWPMEQYLEGPPSVQT

SEQ ID NO: 1739 - DNA, 1621 bp, Homo sapiens
  source
  (1)..(1621)
  CDS (201)..(1421)
  modified_base (591)..(591): a, t, c, g, unknown or other
  modified_base (609)..(609): a, t, c, g, unknown or other
  modified_base (1319)..(1418): a, t, c, g, unknown or other
cacagttgatgagcctcttgcagggcacgcagaccccacaccttttcctcttcttcttggctgggttggctccgccagctccccctgaggaggacgaggaggaggaggaatgattctgcgggcagtctgccagattggcaatttgaaacgcactgtctgtgacggctgctgaggctgctgcgggggagtgaagggctgtcatgacgatgacccctggaggtaatgagatgccccctaaagccgggatagcggaaaaagtccccacgcgctcggggagattcattatctctgcttcagcagcgccgcatttgagcttgttcatgcattcccccgccaaaggtctgcagtgttcaggggataaggtggagaggaaattagtatttgccatttgcaacgacggctctggcgggcagccagctttccccagcctctgggagtcgtttcggtggtgcatgctggtcctgctgccgccgccgccgccgccgccgccaccgccggcggggaggatcgccgaggaggaggaggcggaggaggaggcggcggcggaggaggatttcctgcggggcccgccgtcggtgcgccctcttccgntgctgccgctgctgttgntattttttccttggaagcgcccgtcccctcgtgactccgactcccactcttcgtggtgtcctctctcttctttcctctttttccctccttcattggccttattctccttcctcttgtctcctttcttcttctctcctcttttcttctctctctttctctccgtctctcttcctttctttttctcttctctcccccccttcctcctctctctcgcctctctttctttccccctcgtcttctttctcctttccttttctatctctctccttctgcttctccttttcgctttctctgctcctctcttcccttttctttcctcctctcctttccttctttccgcctccctctttctccctccccctcctgcttctcctctctctccctccttcctccctccctcctctctcgcctctccctccttctttcttcctcttccttttctctcttccctctccccttctcctcctcttttcctctctcttctcttctccctcctcctctccctccttctcctccttctccttctttctttcttcctctctctcgtcttgcgctgcccttctttttgcttcttcttcttttctcttctgtttcttcctctctttctttttttttctcgtccgcgtcttttttttcttcttctatttttctttctctttctcttctcctcttccttctcctcctctcttctattctccttgttcttttcnnnnnnnnnnnnnnnnnnnnnnnnnnnnnnnnnnnnnnnnnnnnnnnnnnnnnnnnnnnnnnnnnnnnnnnnnnnnnnnnnnnnnnnnnnnnnnnnnnnntaaacagatgaaaagatgttcaacatcattagtcattaaggaaatgaaaattaaaactgcattgaggtaccatgacacacctattaagatgaataaaattttaaaacttaccatatctaatgtctataagaatgtggaagaactagaaccttatacactgctgatggaaatgtaaaacagcgcaaccgctttggaaaacaggt

SEQ ID NO: 1740 - protein, 406 aa, Homo sapiens
  MOD_RES (131)..(131): Variable amino acid
  MOD_RES (137)..(137): Variable amino acid
  MOD_RES (374)..(406): Variable amino acid
MTMTPGGNEMPPKAGIAEKVPTRSGRFIISASAAPHLSLFMHSPAKGLQCSGDKVERKLVFAICNDGSGGQPAFPSLWESFRWCMLVLLPPPPPPPPPPAGRIAEEEEAEEEAAAEEDFLRGPPSVRPLPXLPLLLXFFPWKRPSPRDSDSHSSWCPLSSFLFFPPSLALFSFLLSPFFFSPLFFSLFLSVSLPFFFSSLPPFLLSLASLSFPLVFFLLSFSISLLLLLLFAFSAPLFPFLSSSPFLLSASLFLPPPPASPLSPSFLPPSSLASPSFFLPLPFLSSLSPSPPLFLSLLFSLLLSLLLLLLLLSFFLSLVLRCPSFCFFFFSLLFLPLFLFFSRPRLFFLLLFFFLFLFSSSFSSSLLFSLFFSXXXXXXXXXXXXXXXXXXXXXXXXXXXXXXXXX

SEQ ID NO: 1741 - DNA, 1930 bp, Homo sapiens
  source
  (1)..(1930)
  CDS (201)..(1730)
  modified_base (683)..(782): a, t, c, g, unknown or other
tgggcctgacccgggtgtccgcctcccagccccgggcttggcatagaattccgtccttaaaggtttcctggaggtgccagctgggctgcgtctctctgctcctgtctacagataaacacagatacaggacaagcacagatgttcacacacagacgagcgacacgcggacacgcacacacaaacacaagcaacacgcggacatgcacacacacagagcaacacgtggacatgcacacacacacagagcaacacgtggacatgcacacacacacagcaacacgtggacatgcacacacacacagagcaacacgcagacatgcacacacaaacacagagcaacacacagacatgcacacacacacagagcaacatgcagacatgcacacacacacacagagcaacacgcggacatgcacacacacacagagcaacatgcagacatgcacacacaagacagacacacgcggacatgcacacacacagagcaacgacgcggacatgcacacacaaacacagaccaacacgtggacatgcacacacacacacacagagcaacacgcggacatgcacacacacagagcaacacgcggacatgcacacacacggagcaacacgcggacatgcacacacagttacaaggacagacagaagaactggaggctgtggtgcctccactagtgccnnnnnnnnnnnnnnnnnnnnnnnnnnnnnnnnnnnnnnnnnnnnnnnnnnnnnnnnnnnnnnnnnnnnnnnnnnnnnnnnnnnnnnnnnnnnnnnnnnnngtgttgctctgtgtttgtgtgtgcatgtctgcgtgttgctctgtgtttgtgtgtgcatgtccgcgtgttgctctgtgtgtgtgcatgtccacgtgttgctctgtgtttgtgtgtgcatgtccgcgtgttgctctgtgtgtgtgcatgtccgcgtgttgctgtttgtgtgtgcatgtctgcgtgttgctctgtgtgtgtgtgcatgtccgcgtgttgctctgtgtgtgtgtgtgcatgtctgcatgttgctctgtgtgtgtgtgcatgtctgtgtgttgctctgtgtttgtgtgtgcatgtctgcgtgttgctctgtgtgtgtgtgcatgtccacgtgttgctctgtgtgtgtgcatgtcctcatgttgctctgtgtgtgtgtgcatgtccgcatgttgctctgtgtgtgtgcatgtccgcgtgttgcttgtgtttgtgtgtgcgtgtccgtgtgtcgctcgtctgtgtgtgaacatgtgtgcttgtcctgtatctgtgtttatctgtatacttccatgtctgtgtgacagagtccttgtgtctgtgtgtctacatgtctgcgcgtgtccctgtgtctttgtgtatatatatccatgcctgtgtgcctgtgttcctgcgtgtgcttgtgtgtgcacgtgtgcatttgtgtgtttgtcagagtatgtgtgcatgtgtgtgtctgtcagcgtatccatgtgtgcatgtgtgtgtctgtcagcgtatccgtgtgtgcatgtgtgtgtctgtcagcttaaccatgtgtgcatgtgtttgtcagtgtatccgtgtgtgcatctgtgtatctgtccatgtatccgcgtgtgcctgtgtgtacctttgtgtgagcatcaagggacctcccaggcctggtgctcaccgtccgccccaacgcaccctgcattgcagcgactccagctcggacacagacagcttctacggcgcagttgagcggcctgtggatatcagcctttccccgtaccccacggacaatgaaggtgaggtctttctccgcatccactgcccgttcgcctctccccacctggcctcctcttggccgctgtggaggagagggaggtgtgttcggctgtgctccttgctctggccctttggcagtgcgcagtagcatccctgggctctggccttcagcg

SEQ ID NO: 1742 - protein, 509 aa, Homo sapiens
  MOD_RES (162)..(194): Variable amino acid
MHTHRATRGHAHTHRATRGHAHTHSNTWTCTHTQSNTQTCTHKHRATHRHAHTHRATCRHAHTHTEQHADMHTHTEQHADMHTQDRHTRTCTHTEQRRGHAHTNTDQHVDMHTHTHRATRGHAHTQSNTRTCTHTEQHADMHTQLQGQTEELEAVVPPLVPXXXXXXXXXXXXXXXXXXXXXXXXXXXXXXXXXVLLCVCVCMSACCSVFVCACPRVALCVCMSTCCSVFVCACPRVALCVCMSACCCLCVHVCVLLCVCVHVRVLLCVCVCMSACCSVCVCMSVCCSVFVCACLRVALCVCACPRVALCVCMSSCCSVCVCMSACCSVCVHVRVLLVFVCACPCVARLCVNMCACPVSVFICILPCLCDRVLVSVCLHVCACPCVFVYIYPCLCACVPACACVCTCAFVCLSEYVCMCVSVSVSMCACVCLSAYPCVHVCVCQLNHVCMCLSVYPCVHLCICPCIRVCLCVPLCEHQGTSQAWCSPSAPTHPALQRLQLGHRQLLRRS

SEQ ID NO: 1743 - DNA, 1501 bp, Homo sapiens
  source
  (1)..(1501)
  CDS (201)..(1301)
  modified_base (1)..(6): a, t, c, g, unknown or other
  modified_base (1396)..(1495): a, t, c, g, unknown or other
nnnnnntgcgttttgtcgttttctcttcttgtttttctgctccttgtgtgtctcgtgttgtgttttggtctgtgtgttttcttggatcgctgttttttctttcttccggtactgtttatgtggttttgttttgtttctctctgtttgctgtttgtcttgttggtgtctgctttgtgttttgtattgtttctttttgtgttatgtttcttcagtctgttcttgttgttccccttcgtgtttttggttgtgtgtgtgtagtttgtgtgtgcctgctgtttgccatttggctgacgttgtgcctctggtttttgtgctggtccggtggttcttttgtcgttgttctgtggtttttcccattcgtgttttgctttgtccgtcttcttcgttgtgtgggtctgcttctttgtcttcattgtggtttgtggtgtttatttcctttctgtttgtttgatgttttttttttttcttattttgtcttctgtgtttctgctggtttcttgttctgtctcattctctggtccttggttgtctgtgttgttgtcccgttgttctgtttgttggttgttttgtttgattttgttcctgtctgttgttccatgtgtttcgcgctgtcctgtgattttcttcggttgttcgttgtctctgtttatccgtcgcattggcctgattctgtctggtccctgttgtgtgtttttcttgtgtgtgttctctgttgtgtcctgttgttgttgtttgtggtctcttggtttttgtctgtcttatctatgtgtgtttctgttgtgtctctttgtcttgtttgtattgtcttccactgtggtgttgtctgttggttgtttattcttttctgcgtgttactgttttgctctgtcatctgtttcttgtatttgtttgatcgtctctttgatatattgccctgttctgttcgttctctgtcattttctctgtttttctgtagggctctgtgttctgtcattgttctgtatttgttcatgtgtgatgtgtcgtttgtgttattgttccggtatatttttgtctgtctccttattgtattcttcattattctctgcctgtcttctctctcgtcgttctgtttgtgctcgattttcatgtgtattgtcttgtcgtggcattctgatcatgttttgttcctcgattctggtatatgtcgggtcatggtgatgtctgctatctgtctattgtatgtgatcgtgtatgcgtcattcgtcattgatggcaccccattggtctgtatcatctgttatgtctgttccggcgtcgtatgtttgtggtggtatttgtgatgtctggatgtttctatggtcatcatcatggatactgcgtatgatccatggagtacgaagtcgtgtaagtatctcgggagtccgtgagatgtcannnnnnnnnnnnnnnnnnnnnnnnnnnnnnnnnnnnnnnnnnnnnnnnnnnnnnnnnnnnnnnnnnnnnnnnnnnnnnnnnnnnnnnnnnnnnnnnnnnngctggc

SEQ ID NO: 1744 - protein, 366 aa, Homo sapiens
MFLQSVLVVPLRVFGCVCVVCVCLLFAIWLTLCLWFLCWSGGSFVVVLWFFPFVFCFVRLLRCVGLLLCLHCGLWCLFPFCLFDVFFFSYFVFCVSAGFLFCLILWSLVVCVVVPLFCLLVVLFDFVPVCCSMCFALSCDFLRLFVVSVYPSHWPDSVWSLLCVFLVCVLCCVLLLLFVVSWFLSVLSMCVSVVSLCLVCIVFHCGVVCWLFILFCVLLFCSVICFLYLFDRLFDILPCSVRSLSFSLFFCRALCSVIVLYLFMCDVSFVLLFRYIFVCLLIVFFIILCLSSLSSFCLCSIFMCIVLSWHSDHVLFLDSGICRVMVMSAICLLYVIVYASFVIDGTPLVCIICYVCSGVVCLWWYL

SEQ ID NO: 1745 - DNA, 1282 bp, Homo sapiens
  source
  (1)..(1282)
  CDS (201)..(1082)
tgtgttgtggtttgttgtttcgttccgttggtttggtggttgttttctcttccttttatttattgttgttgtgtgtgtgtttctggttgttggttagtctgtttcgtggttttagcttccttttttgtgtctttggtgtttgctcttgagttacggtgttggtgacctcgtgcctgttgtgttggctttgttgggtttggatgctgcctgcgtggtgtttgtgtcgtctttttccatctgttcgtgtattggtgttagtggtccactgttcgtgtgttgcgttttgtgggtgtgtgttgttgtttgttgttttgtgtgggtgtgtcgtcgtgcgtggttgtgtgttgtgtttgtgtggtcttgctttgatgttcggtatgtttgttctaatttgttgtgggtgtggtgtgtttctgttggtggtgtttggtgtccctggactgtgttggtggtctgtgctgtgtttgtatttgtgtaagtgtgtgttctctgttcgacgttccgtgttgggtgatcgttttgtttgttgttcgcttgtgtgtgtgtgttgttggtgttggaagctttttgttatggatgttcaccgtagttgtgtggttgtgttgggttgtgtcatgggaccgttctgtgtgtgcctcctgggtggtggtgttgggctattgtgttgttttaattttgtttttgttgttgtgtgtctgtgtgttgcttcactgagtcattgtgttcttggcacttcctgtgtcacaatttgtgtccgttccttgggtgttgttgttctggtgtatgtgtccgtgcgcgggtgtgggggtctggtgttcctgttgtgtgtcttgggtagttcggtcttgtatctagttggttgttgtgtattgtggttcctgtcgttgtgttgttttattttgtctctggtgtattgcgttgttttggtccttgttctctcccttaattgtaattccttgtctgtgttgtctctgggctctttgctgtgtccctcctctgtcgtgtcctgtgtttgtgtggtcatcctgtatgttttgtgcactcgttttttattgtggtcattggcgttgtggtctgtctgattcattaggtgttgtccatctctgactcattgtgtattattgtctgtgtgcattgttgattgctgcatatctgctatattgtgaattgtgtgatctgtttactgcgtgcattcctcatttgattggcatctctctcattgtgcatttgatcatcctgtattggtctgttcctgtgtctcggtatggtttcgttgtcggaa

SEQ ID NO: 1746 - protein, 293 aa, Homo sapiens
MLPAWCLCRLFPSVRVLVLVVHCSCVAFCGCVLLFVVLCGCVVVRGCVLCLCGLALMFGMFVLICCGCGVFLLVVFGVPGLCWWSVLCLYLCKCVFSVRRSVLGDRFVCCSLVCVCCWCWKLFVMDVHRSCVVVLGCVMGPFCVCLLGGGVGLLCCFNFVFVVVCLCVASLSHCVLGTSCVTICVRSLGVVVLVYVSVRGCGGLVFLLCVLGSSVLYLVGCCVLWFLSLCCFILSLVYCVVLVLVLSLNCNSLSVLSLGSLLCPSSVVSCVCVVILYVLCTRFLLWSLALWSV

SEQ ID NO: 1747 - DNA, 1402 bp, Homo sapiens
  source
  (1)..(1402)
  CDS (201)..(1202)
  modified_base (286)..(385): a, t, c, g, unknown or other
tctttgaggattctggtagctgtcctttaactctctgtgtccatgtgttcaattcttttgatttttagatcccacaaataagtagctgtcatttaactctctgtgtccatgtgttcaattgttttgatttttagatcccataaataagtgagaacatgtgatgtttgtctacctgtgccagtcttatttcacttaatataatgatcaccacttccatccatgttgttgcaaatgactggatcttattcttttttatggctatattgtattccattgtgtatatgtnnnnnnnnnnnnnnnnnnnnnnnnnnnnnnnnnnnnnnnnnnnnnnnnnnnnnnnnnnnnnnnnnnnnnnnnnnnnnnnnnnnnnnnnnnnnnnnnnnnntctctcttctctcttttgttgttcctccttccctgtcttcttttgttctctttcggtctctgcgtctctttttttctcgctgtctgtcccctttgttcttttcttctctctttgctttctctgcgtgtcttgcgccttgtcccccttgttccctttctctccgttctgtcttttttcttttccctctctttgctcttgcctctctctgctttttgttttgtttttttttttcgtctttcgttcttcttgtttttgttctgtttttgtcttttgctctttgttgttctctttcgtctctctctggtttcttctttgccgttcctttcttgctttgtgctcgcctcctgctctttctcttccttttgtcttcttccttctctctttctctctctgcttgtgtctttgtctcttcttttttcctgtgttgctttgtccctctctcttttctttgtttttcgcctgttgtatctcacttcactttctctctgctctttgtgctcagtcgcttgctgcgttgtcttcgttctttgtcgttgctttgtttatcgcgtctgcgtttgtctcgttccgtgtctgctgttgtgctttccttctctgtcctccctcccctcccctctgctctgctcctctctcctgcgttctctgccgtcctcggtctgctctctttctcttcctcttcttctccttcccgtctcctcctctctgtgaaaagaaagaaagaaaggaaggaagaaagaaagaaggaaaaaatgggagaaaatatgagtatgtttgcgcacagaatacgtgttttcatgtccagtgtctagcagggtgaatggtacacagtaggcatttgataaacatgaaggaaggcagggagggagattatcaactcaagttgtcccagaacccacgagttgctgaagtactgaccgtacttagggtacccagtagaaccacagctgactcgcactcaccgccaattaactggtaaagtttggaaaagcctaagttccttaaagccaagttcaaatc

SEQ ID NO: 1748 - protein, 333 aa, Homo sapiens
  MOD_RES (29)..(62): Variable amino acid
MITTSIHVVANDWILFFFMAILYSIVYMXXXXXXXXXXXXXXXXXXXXXXXXXXXXXXXXXXLSSLFCCSSFPVFFCSLSVSASLFFSLSVPFVLFFSLCFLCVSCALSPLFPFSPFCLFSFPSLCSCLSLLFVLFFFFVFRSSCFCSVFVFCSLLFSFVSLWFLLCRSFLALCSPPALSLPFVFFLLSFSLCLCLCLFFFPVLLCPSLFSLFFACCISLHFLSALCAQSLAALSSFFVVALFIASAFVSFRVCCCAFLLCPPSPPLCSAPLSCVLCRPRSALFLFLFFSFPSPPLCEKKERKEGRKKEGKNGRKYEYVCAQNTCFHVQCLAG

SEQ ID NO: 1749 - DNA, 1057 bp, Homo sapiens
  source
  (1)..(1057)
  CDS (201)..(857)
gaaatcggtgaaagaaactccatgtggcacagcccttgcctggcatgggggaggcggtctgttctgggcacctgagcgccccaagccatggtcctttgggtccctgatgccactctgagctcacagctcattatcaacctggcatctggcagccccgttcatggggaagaaattcaaagttaaatgtgaaggttgtgagaatggtcgctagtggagggatccacgcgaatcgacaactgatgctgtcattggccagggtgcctgaggcgggaggaatgccctgtgtctgtgtgtgcatgcgtgcccgtgcatgtgtttgcatgtgtgttctgtgcatgcatgcctgtgcatgtgtttgcatgtgtgttctgtgcatgcctacccgtgcatgtgtttgcatgtgtgttctgtgcatgcacacccatgcatgtgtttgcatgtgtgttctgtgcatgcacgcccatgcatgtgtgtgcatgcatgtccagcatgtgcgtgctcgtgtgtgcatgcctattcatgtttgtgtgttctgtgcatgcacacccatacatgtgtgtatgtgttctgtgcatgcacacctattcatgtgtgtgttccgtgcatgcatctccagcatgtgcatgcttgtgtgtgtacatgtatgcctattcatgtttgtgtattctgtgcatgcacacccatggatgtatatgcatgtgtgttctttgcatgcacacctatgcatgtgtgtgcgttctgtgcatgcacgcctattcatgtgtgtgttctatgcatgcatgtccagcatgtgtgtgtttgtgtgcatgcatgactattcatgtttctgtgttttgtgcgtgcacacctatgcataagtgtgtgtgttctgtgcatgcatacccatgcatgtatgtgcatgtgtgttctgtgcatgtacacatgtgtgtgtaaacaggaggccaccacgttattccaatggccccagccctctcttacaacccgcactggtgggagcagcaaccaggagatcacaagcaggggcagaaatgagccgagactcctggttcctcaagtc

SEQ ID NO: 1750 - protein, 218 aa, Homo sapiens [sequence omitted]

SEQ ID NO: 1751 - DNA, 1315 bp, Homo sapiens
  source
  (1)..(1315)
  CDS (201)..(1115)
ttactgaacatataagtggaataaacttgtttagtgacagaaggtcccctgtctggtttccagaattatggggtagatgctgttgctataggaggaccaaatgaaacagaactgaaaccgttccccactgtaataagcttgaaatcaaaagcagtattgcaatttctgggaattaattgaagacatggagttttcaaccaatggaaaagaataatggaaaaagactattgggtaatatggggttgttatcccccctaacaataatgctgccaattgcaaatttttcctctgttgtcgttcactgcacgggcacaggtcccttcatttcacgtcaacgtccagttcacttcacgtgtcacgttcagttcacattgcttcacatccactaccgttccgttcaattcacgtcccgtcaacgttcacattcgttgtcaatgttcattgttcatggtcacattcgttcatttgtctgttcgggtagtgttcacgttcatttcgtttcgtttctgttcattgtgttcgtttctttcacgttctcggttcgttcggttcgtgttctctctcgtctttgcgttcgttcatttagtgtcggtgcagtgttcatgttcatttcggtcgttctgttcgtgttctctgtctcgtcggttcatgttcattcatgttggttctttctttctttctttcgttctttgtttctttcgttctgttctttccttccttctttctttctttccttccttctttccttctttccttccttctttccttctttccttccttctttccttctttccttctttcttttttcatgcagtctcactttattgcccagactggagtgcaacggtgctatcttggctcactgcaacctccacctcctgggttcaagtgattctcctgactcatccttccaagtagctgggattacaagcatgcaccactacaccaggctaatttttctatttttaatagagacgacgtttcactatgttagtcaggctggtcttcaactcctaacttcaggtgatccacccaccttggcttcccaaattgctgggattacaggcatcagccaccatgcctggcctccattcaattatcttagatggctttagcagaaccatgatggaaaatgacagataaatataaacccttgtgtgcttaaccaggtggtagcttggttttgaaactgctatttctacatgtgagaccttaacttaaaaagtgtattgtagccattgtcactgggattttgggaatgcattttttggtctcattattcattaaaaagaaacacacatacacacacatacat

SEQ ID NO: 1752 - protein, 304 aa, Homo sapiens [sequence omitted]

SEQ ID NO: 1753 - DNA, 1750 bp, Homo sapiens
  source
  (1)..(1750)
  CDS (201)..(1550)
  modified_base (251)..(350): a, t, c, g, unknown or other
gggcgcccagctaacttgggaggctgaggcgggagaatggcgtgaagccgggaggcggagcttgcagtgagtggagatcgcaccactgcactccagcctgggcgacagagcaagactccgtctcaaaaaaaaaaaaaaaaaaaagaatggtcagatggatgatggatggaaacgggatggatgaatgatgaatcgcccagatgaataggggaatccttagagtgacctgcagcatgcaagctgcactgccnnnnnnnnnnnnnnnnnnnnnnnnnnnnnnnnnnnnnnnnnnnnnnnnnnnnnnnnnnnnnnnnnnnnnnnnnnnnnnnnnnnnnnnnnnnnnnnnnnnncttctggctcttggtttctggttctctttcgtcgttttgttctgcctttccgttctcgactcttcttctcctcttctcttcgtctccttctgctctttctctctcctgcgttcgcctctgtccgcgtgcgtgcgctcgtgggttcgttgtccccgctgtgtctctgtctccttcctttgttctcgtgggtcgttgtctgtctgtcttttctgtcttgggtgcgttcggtgccttcctcctcgtcgcttctcgcttctctgctttgtgtttttttttgtttctcttgttgatagcgcgtcttctcgtcgctttcttctctgtccttttgtttttgttttgcctgtttttttgtctttcctttgttgttgtccgttttcgcggtgtttttttttttctttttcttgtttttctcttttttctggttctttctgttctttttttttttgcctttgttcttttttctgctgtttcttgctgcgtgtgtttttctcgtgctgtgtttcccttctctgttctcctttttctttctttttcttctcgtgcttcgtctgcttcttgtcggtctgtgtctcctgcttgtgtggcttgtttgcttgtggcgtccttgttgttgtttgtggcgcttctcgtctctcgctctgccttcgcgttgtctggctcgtgcgcgtgtttgtcgtggtctcttcctcctctgctttccctttgttttgtgtgtttctttgtttttttcttgtctttgtgctctgctcctctgtgtcttgctgctgtgcttgcgggtggccctcttttccttgtttgtcttctgtgttctgcgtctgtcctgtttgggcgttcttgtgtgttttcgtcgtgttccttctcttgtttttgactgtggttctcgttgttttttctctttcttctttcttcgttgtcttttgttcgtctttctctttgtccttttgtcctcttctttctctctgtcctgttttctatctctttttcttttctgttggttgctcgactggaagtatggttggatggatggatggatggatggatgaatgggtgggtggaaggatgaatggatggatgggtggaagagtgggtggacaggtgaaaggtaagtggatgggtgaagggtggatggggagaggagtctgtaggagcttcctcctgaaggcaccgtgccaccaaaggaagcacctgcatcactgctgagcaggaccatccatcgcgcttgccaacccttttgcccatccacgctgcatggatggatggaagtatgggtggatgggagggtgggtgggtggatggatgaatgggtgggtggaaggatgaatggatggatgggtggaagagtgggtggacaggtgaaaggtaagtggatgggtgaagggtggatggggagaggagtctgt

SEQ ID NO: 1754 - protein, 449 aa, Homo sapiens
  MOD_RES (18)..(50): Variable amino acid
MNRGILRVTCSMQAALPXXXXXXXXXXXXXXXXXXXXXXXXXXXXXXXXXLLALGFWFSFVVLFCLSVLDSSSPLLFVSFCSFSLLRSPLSACVRSWVRCPRCVSVSFLCSRGSLSVCLFCLGCVRCLPPRRFSLLCFVFFFVSLVDSASSRRFLLCPFVFVLPVFLSFLCCCPFSRCFFFSFSCFSLFSGSFCSFFFCLCSFFCCFLLRVFFSCCVSLLCSPFSFFFFSCFVCFLSVCVSCLCGLFACGVLVVVCGASRLSLCLRVVWLVRVFVVVSSSSAFPLFCVFLCFFLVFVLCSSVSCCCACGWPSFPCLSSVFCVCPVWAFLCVFVVFLLLFLTVVLVVFSLSSFFVVFCSSFSLSFCPLLSLCPVFYLFFFSVGCSTGSMVGWMDGWMDEWVGGRMNGWMGGRVGGQVKGKWMGEGWMGRGVCRSFLLKAPCHQRKHLHHC

SEQ ID NO: 1755 - DNA, 1474 bp, Homo sapiens
  source
  (1)..(1474)
  CDS (201)..(1274)
aaatctattcaccactaaattaactttttaagttacatttttaatgcttttggatactggattattatttactttgtacttttgaggatttattttcaattttactaagtaaagtccctgtcctatttttttagtcatgtgtttggcaacaaaattatgaagtaagttgtcatggtaataagataaatactccgaagaggatgagccaagttagacttgttcctgtattgctgtggatattctgtattgttgttttgctgtgcatattctgcattgctgtggatattctgcgttgtcgtgttgctgtgggtattctgtattgctgtgggtattctgtattgctgtggatattctgtattgttgttttgctgtggatattctgtattgctgtgggtattctgtattgctgtggatattctgtattgttgtggatattctgtattgttgttttgctgtgcatattctgcattgctgtggatattctgcattgtcgtattgctgtgggtattctgtattgctgtggatattctgtattgctgtgggtattctgtattgctgtggatattctgtattgctgtggatattctgtattgctgtggatattctgtattgttgttttgctgtggatattctgtattgctgtggatattctgtattgctgtggatattctgtattgttgtggatattctgtattgctgtgggtattctgtattgttgttttgctgtggatattctgtattgctgtgggtattctatattgctgtggatattctgtattgttgtggatattctgtattgttgttttgctgtggatattctgtattgctgtgggtattctgtattgttgttttgctgtggatattctgtattgctgtggatattctgtattgctgtggatattctgtattgttgttttgctgtggatattctgttttgctgtggatattctgtattgctgtggatattctgtattgttgtatttctgtgcttattctatattactgtggatattctgtattgtggtattgttgtggatattctgtgttgctgtattgctgtggatattgagtgcagagtttaccttagcacatacagcagcccttccacaagtgactcgccctggggcacattcacccaagcaggctgtagagaatggttggttacatcctcccctggattgaaagacaccctccgagtggtgcttaccacacctcatggtgtagatattcgtcccttagttaaactcttccagactttctttcagtttgcctgaggtcaccaagctggcacctgggcagagaggtttaacattatcagcttcaaacaccggccctgccagcatcctcgtccaggcacctctgtctagcattgcaggcaccacctcacccgagggtgtgatgagcatcattcatcattcttccttttgctcatgtatttgctcattcaccacacctctagcgatacccaccatgt

SEQ ID NO: 1756 - protein, 357 aa, Homo sapiens
MSQVRLVPVLLWIFCIVVLLCIFCIAVDILRCRVAVGILYCCGYSVLLWIFCIVVLLWIFCIAVGILYCCGYSVLLWIFCIVVLLCIFCIAVDILHCRIAVGILYCCGYSVLLWVFCIAVDILYCCGYSVLLWIFCIVVLLWIFCIAVDILYCCGYSVLLWIFCIAVGILYCCFAVDILYCCGYSILLWIFCIVVDILYCCFAVDILYCCGYSVLLFCCGYSVLLWIFCIAVDILYCCFAVDILFCCGYSVLLWIFCIVVFLCLFYITVDILYCGIVVDILCCCIAVDIECRVYLSTYSSPSTSDSPWGTFTQAGCREWLVTSSPGLKDTLRVVLTTPHGVDIRPLVKLFQTFFQFA

SEQ ID NO: 1757 - DNA, 1333 bp, Homo sapiens
  source
  (1)..(1333)
  CDS (201)..(1133)
  modified_base (250)..(349): a, t, c, g, unknown or other
actagtatcggagatagaagtaagaataaatgttaccctgggctaggaaagtggggtgttattgactggagaaggtcatgagctaactttcagcaatgatgcgaacatagttattacgggtcttggaatcatagtgtgatggtcacatgaatatataaatattaaaacgtattaagctgtacacttaaaatttctggcacatgttaataacatatttaaaaacacttgtgatctcaataaacattgaaannnnnnnnnnnnnnnnnnnnnnnnnnnnnnnnnnnnnnnnnnnnnnnnnnnnnnnnnnnnnnnnnnnnnnnnnnnnnnnnnnnnnnnnnnnnnnnnnnnnctcctctctcctcccttcctcctctctcctccccctccccccccttctccctccttctctctctccctgccctccctcttccctctctcgcttccctctctctttctccttcccttccttgcctcctcccgtcctcccttccttcttcctcctccttcctctctcccctccgctggtccgtccctcctcctcctccgctcctccctccccccgcctcctctcgctccccctctcttctctcctttcttgcttcttcttcttttctctccctgtcgctctctctcttctcttttctcttcctcccctcctcttctgttctctcgtcttctctctccgcttcgctgcctctctcccctgtcttgctcgtctttcctctccttccttctctctccctctctcctttcttcgctcctctcttcgctcccgttgcctcccctccctccccttcctcctttcctcgctcgtctcccccccgcttttcgtcctttccttcttcgtctccttccctcctgtcgagctctcctccgactcttccctctccttcttctcatgttcgtttcattcgtcttttttttgttcactttttttttctttatatgatggctttcttctcatgtgtggtgtctcttttgcattgcctgtttctttgttttttttatccttatgtatctatccatgtccctgtcatgactttcaatgggttcctcaaatctccatctttgtcttttcctcttcttactctacatgttctgtctcggaggcattattccatcaattactatagccttcactacatcctagtatctcctaagtctccctgtcaacccagattccacccttctctgcctcaggtccataaagtccgtacccagctcagtaattgagacacaggggacagacatcagcgtggccaaaggaatgcaagaaggtggtaaagagaaatgccctttcaatgagtttcatatggatttccagcaatatagc

SEQ ID NO: 1758 - protein, 310 aa, Homo sapiens
  MOD_RES (17)..(50): Variable amino acid
MLITYLKTLVISINIEXXXXXXXXXXXXXXXXXXXXXXXXXXXXXXXXXXSSLLPSSSLLPLPPLLPPSLSPCPPSSLSRFPLSFSFPSLPPPVLPSFFLLLPLSPPLVRPSSSSAPPSPRLLSLPLSSLLSCFFFFSLPVALSLLFSLPPLLFCSLVFSLRFAASLPCLARLSSPSFSLPLSFLRSSLRSRCLPSLPFLLSSLVSPPLFVLSFFVSFPPVELSSDSSLSFFSCSFHSSFFCSLFFSLYDGFLLMCGVSFALPVSLFFLSLCIYPCPCHDFQWVPQISIFVFSSSYSTCSVSEALFHQLL

SEQ ID NO: 1759 - DNA, 1186 bp, Homo sapiens
  source
  (1)..(1186)
  CDS (201)..(986)
  modified_base (1)..(69): a, t, c, g, unknown or other
nnnnnnnnnnnnnnnnnnnnnnnnnnnnnnnnnnnnnnnnnnnnnnnnnnnnnnnnnnnnnnnnnnnnngctttttgtttgtttcttctttgttgtttgttacgtttttttttttgtcttctttttttgtttgctgttactctctttttgtttgatgcttgggtgctctcgttttttttcttattgtggtagttagtacgatgtatacattttttgtttgctttcgctttttgttcttgggttttcttttttgtttctgtgtgtctgttttcttgtgtcttttgtgtttattttcctggttgcttgtcagttttttgttcttttcttctgttcctttgttttgtgtcttctctccttctttgttcttctctttttgttctcccttttcttgttctttctcggctcttttcttttcttcttcttctcgttcgtctttctttctttgttctctctacctctgttccttcttttcgtttcgcttttctttgttttcttctctttcttcttgttcttcctcttctgctcgttcgtttgtcttgttgttttttgtgtttcttcttgtggccctcctctttcgtgcttctctctgtctcctctctttcctcttgccctttggctctctctgtttcgctctcttttcctctctcctctttttcgtcttctctcgtcgtctctcttttgctcttcctgctctgtcttccgtccttccgctctcttcgtcctctcgcgttctcccttgtgttgctcttcgttttttctctctccttgtcttcctgtcttctgtttttttctctgctgttgtgtccgtttctctttttttttttttcttgtatttcgctctctgtttcttctgtctcttttccctctctttctctctctctctttgttctctcccttccgtttttgtctcgttcttctcgtctcgtttcactttctgtcttttttctctttctcttcttttctcgttcctttttctttttgtgtgatttttgtggttcttttttgcgtctttctattgttttgttttttttttttttgttgtgtggtgttgttgtttctgttgttttttcgtgtctcttgttttcttcttttcgtttgttttgtgttgttttgttggtctgggtgtcttttcccttcctgcccatggtcatgcggttccttttgctttgtttgtttatttgttcgt

SEQ ID NO: 1760 - protein, 261 aa, Homo sapiens
MYTFFVCFRFLFLGFLFCFCVSVFLCLLCLFSWLLVSFLFFSSVPLFCVFSPSLFFSFCSPFSCSFSALFFSSSSRSSFFLCSLYLCSFFSFRFSLFSSLSSCSSSSARSFVLLFFVFLLVALLFRASLCLLSFLLPFGSLCFALFSSLLFFVFSRRLSFALPALSSVLPLSSSSRVLPCVALRFFSLLVFLSSVFFSAVVSVSLFFFFLYFALCFFCLFSLSFSLSLCSLPSVFVSFFSSRFTFCLFSLSLLFSFLFLFV

SEQ ID NO: 1761 - DNA, 1354 bp, Homo sapiens
  source
  (1)..(1354)
  CDS (201)..(1154)
caccagccccttactcttcaagccctgactgtggagttggtagatgcctctgatcctcagtattctctctggcaatgttccacggcttctccttcctgggagctggctccataacttgattttccccaaacgtgttgcaatccctgctgccccttagccacccagggtcttgtgtgggtatgagtgtagaggatgggggtatgccaggcctgggccgtcccaggcaggcccgctggaccctgatgctactcctatccactgccatgtacggtgcccatgccccattgctggcactgtgccatgtggacggccgagtgcccttccggccctcctcagccgtgctgctgactgagctgaccaagctactgttatgcgccttctcccttctggtaggctggcaagcatggccccaggggcccccaccctggcgccaggctgctcccttcgcactatcagccctgctctatggcgctaacaacaacctggtgatctatcttcagcgttacatggaccccagcacctaccaggtgctgagtaatctcaagattggaagcacagctgtgctctactgcctctgcctccggcaccgcctctctgtgcgtcaggggttagcgctgctgctgctgatggctgcgggagcctgctatgcagcagggggccttcaagttcccgggaacacccttcccagtccccctccagcagctgctgccagccccatgcccctgcatatcactccgctaggcctgctgctcctcattctgtactgcctcatctcaggcttgtcgtcagtgtacacagagctgctcatgaagcgacagcggctgcccctggcacttcagaacctcttcctctacacttttggtgtgcttctgaatctaggtctgcatgctggcggcggctctggcccaggcctcctggaaggtttctcaggatgggcagcactcgtggtgctgagccaggcactaaatggactgctcatgtctgctgtcatgaagcatggcagcagcatcacacgcctctttgtggtgtcctgctcgctggtggtcaacgccgtgctctcagcagtcctgctacggctgcagctcacagccgccttcttcctggccacattgctcattggcctggccatgcgcctgtactatggcagccgctagtccctgacaacttccaccctgattccggaccctgtagattgggcgccaccaccagatccccctcccaggccttcctccctctcccatcagcagccctgtaacaagtgccttgtgagaaaagctggagaagtgagggcagccaggttattctctggaggttggtggatgaaggggtacccctaggagatgtgaagtgtggg

SEQ ID NO: 1762 - protein, 317 aa, Homo sapiens [sequence omitted]

SEQ ID NO: 1763 - DNA, 1672 bp, Homo sapiens
  source
  (1)..(1672)
  CDS (201)..(1472)
caggatctcggctcactgcaacctccacctccggagttaatgtgattctcctgcctcagcctcacaggtagctgggattacaggtgcccactaccacaccctactaatttttgtgttttttagtagagacagggtttcatcatcttggcctccccaagtgctcgggttaccacacctggccacagtaagatgatcctttgatgagagaattggtcgtgtgttctctgcacttttttgtttggttcggttttcaaccaatgtcccccaccccctacccacccctgttttcacgttgcagatctaaaaacacatcattgcctttattcttattatttattttgctatcaaggaacaccagaccaagtactgagcacattctctcttgcactcattttgtgtgtgcttgcaggtgtgtgtgcttgcaggtatgtgtgcttgcaggtgtgtgcttgcaggtgtgtgtgcttgcagctgtgtgtgcttgcagctgtgtgtgcttgcaggtgtgtgtgcttgcaggtgtgtgcttgcaggtgcgtgtgcttgcaggtgtgcgtgcttgcagctgtgtgtgcttgcaggtgtgtgtgcttgctgctgtgcgcttgcagctgtgtgtgcttgcaggtgcgtgtgcttgcaggtgtgcatgcttgcagctgtgtgtgcttgcaggtgtgtgtgcttgctgctgtgtgcttgcagctgtgtgtgcttgcaggtgtgtgtgcttgctggtgtgtgcttgcagctgtgtgtgcttgcaggtgtgcgtgcttgcagctgtgtgtgcttgcaggtgcgtgtgcttgcagctgtgtgtgcttgcaggtgtgtgtgcttgcaggtgcgtgtgcttgcagctgtgtgtgcttgcagctgtgtgtgcttgcagctgtgtgtgcttgctggtgcgtgtgcttgcagctgtgtgtgcttgcaggtgtgtgtgcttgcagctgtgtgtgcttgcaggtgcgtgtgcttgcagctgtgcgtgcttgcagctgtgcgtgcttgcagctgtgtgtgcttgcaggtgtgtgtgcttgcaggtgcgtgtgcttgcagctgtgcgtgcttgcagctgtgcgtgcttgcagctgtgtgtgcttgcagctgtgtgtgcttgctggtgcgtgtgcttgcaggtgtgtgtgctagcaggtgtgtgtgcttgctggtgcgtgtgcttgctggtgcgtgtgcttgcaggtgcgtgtgcttgcaggtgtgtgtgcttgctggtgcgtgtgcttacgggtgtgtgtgcttgcaggtgtgtgtgtgcttgcaggtgtgtgtgtttgctggtgcgtgtgtttgcaggtgcatgtgctagctggtgcgtgtgtttgcaggtgcgtgtgcttgcaggtgtgtgtgactggcgtgttgttgtccacattttgagagggggaaaattatttttttctagtgtaatctcctttcaatttatttttctgttctgaaagaacaaaggaactattattaagttcaagtactaagaatactactgtccagattaagtaaagataatcagttagtttgggggatgggagaattagtcaactataccaagctgcagacatctaattattctgtgtcttcattctccccttcttccctttaggattataaccctctgaactgttgtagggctcttggccac

SEQ ID NO: 1764 - protein, 423 aa, Homo sapiens
MRELVVCSLHFFVWFGFQPMSPTPYPPLFSRCRSKNTSLPLFLLFILLSRNTRPSTEHILSCTHFVCACRCVCLQVCVLAGVCLQVCVLAAVCACSCVCLQVCVLAGVCLQVRVLAGVRACSCVCLQVCVLAAVRLQLCVLAGACACRCACLQLCVLAGVCACCCVLAAVCACRCVCLLVCACSCVCLQVCVLAAVCACRCVCLQLCVLAGVCACRCVCLQLCVLAAVCACSCVCLLVRVLAAVCACRCVCLQLCVLAGACACSCACLQLCVLAAVCACRCVCLQVRVLAAVRACSCACLQLCVLAAVCACWCVCLQVCVLAGVCACWCVCLLVRVLAGACACRCVCLLVRVLTGVCACRCVCACRCVCLLVRVFAGACASWCVCLQVRVLAGVCDWRVVVHILRGGKLFFSSVISFQFIFLF

SEQ ID NO: 1765 - DNA, 8192 bp, Homo sapiens
  source
  (1)..(8192)
  CDS (201)..(480)
  CDS (2252)..(2385)
  CDS (2891)..(3696)
  CDS (7824)..(7992)
cttccaggtgggccggcattgtgactgctgtagtaacttagttctgagatacctgctctgaagaatgacttatttacttccttcaaagaatgcagtgcaagtttattgggggtgggggacaaagagggctccacactcctgggaagcctgagaaacccttgttgctgggacatgcagccttgtttgacccttcatttgggatgagggtgggaggagccagaagccagaggaaagaactgagccagtgccctgatgggcccaattcctgccctgcccagggaaagggcaggttcctccaggttggccacggtctcagagctacaagggaggtactcacacaggcttcctgctgcaggtgctgcagggccctcttggctgggaggaggaagctggtgaggcagtgcagcccgtccccaccgtggcacctctcggccacgctgaacagctgccagagcaccgtggctgccgtggcttcaaacggtgggtacaaggcagagagcgtcctctggatacaggcatcaagagattccagatcctgaaatgaaagagagaattcagaaactttagggacataactcaagacaggtgcacaccacagtccaaggctggcactgaaggatccacacggaagtcccttgtcctgtgtctggcatgatgtgagttaactgagaaagacaaaatgtgcaggcgaatccatggtgcagggcgagctcctggtggttctccttgtgctgtcacacagcagaggggcaggtgcattaggcagacccgtggccctgtcctggggcaggggctctatataccacctctataaatgtgggctgccattcctataacactcacactgaggcacaaccaagcctagatttagggtaagtttcatcccctgcacctgaacagcataaggtctttggggtggggctgtgagtcctgcgggagctgctcctcccggctctcctgggtttgtacagggaggaggggacaaccacttgtggggaggacaaagctggcccacgcgccactttgttctcagaaaacaagctcatcccacagcaaatacattttaattgtgtcgatgattttgttttcatttaaacagtactgatggtgaaaaccttagggtgccctcctcaaggctgctgaattgtgcccatttggcaccctaaaaacaggatcattggccactgacttccgcttggcattttggtgcaacatgcttttatgaagaggcaatgattcttgtttaaaaatttgtaatgctgtttttagagtaacaatccctgaggaaataccacaaggctcatgtctgtagaaaagaactgcaaggcagtgaaagccaaagaagctaaaaattgtgaagtcagtttttataatggcacgacagttacatgagaaacacctctgaatagctaatcacacagataatttcctaaggaaattgaaaataaaacagggactcctctggcctgcagtgggagaagggtctgtcttgtcagctgggcctgtgactggaggtacctgcagcagagctcagcttctggaaactgcgtgactcagggaagctcagggctgggttcctgagtcctgtgtcccacagtagagcctcctgccggccctgccaccccatgggtcagctcccttccctgcacacactggctcgttctcactcacccgacagggccactcacttgttgacaggaatgatctaaatacagtctgagttcatgcagaaatgctatgtgatctaatttccaaaaactcaaatcacacctgagccacacagcaaacacatagtccatgagaatgagtgggcccgtctcaggccagggtcacacagtccatgagaatgagtgggcccgtctcaggccagggtcacacagtccatgagaatgagtgggcctgtctcaggccggggacagaatcacccacatcgggcaccaggatggctgtgctttaggatttggggcaaatgctcaattgacacaggagaaatgggcaggaaggaagaggaacatgatctaggagaggcatctcgaatggcctgttctgcacgagctgaaatgtcgacactgggccatctccggaagaggcctgttctgcaggagatgaaatgccgacactgggccatccccgggagagacgtattctgcaggagctgaaatgccgacactgggccatccccggaagagacgtcctcctacttctctgattcccaaatccaggcccattcctcccccaccctcaagtccagatgtggtcagcagcccagagctctgtccagggccaccttctccagggccaccgtctcaaccgcccgacataaggaaggagatggctggtgcactgcgctgtcaagccctgaccctacctctgcctgattccatggtgactggggcaggccccatgctccactcagtgggtcccacctgcaccacctccccaggatgactcccactggggccactcagggcctgggccaggccagagctgccccagggaagctgcctgcagactgagaattgggtaggttgaggtgctgagtaacccaagtgagccatgaaccaggtttattcatagcagccttcgaatgctcctgagtcctgtgtcctttgagggcggagtgtgtgctgtctcctggcctgatgtgtctgcagcatcccgattctggggagcacctttgggggtgccactagatgactgctcatgatgagggagctgcagtgtgtgtgcaggactccgaaggagtgtaagcctggccaggtgcagtgtacggacagaggaacccctgccagctgtgtccaggcctcggggccaggagagagagcagacacagggcaggggacctgcaagcacaggtccaccagctcagcccaatttcttgtctttgtagaactcaggattcttgtttctgccaaatgtacaaacgtgtgctgacttcaaacccgagggccttccagtttacgagatcatgagcctcactgagggacagacggtgcgggtgtgtgcacgtgttgcagattgtgtggatgtgtgcacgtttgttgcagagtggctggtgtgtgcacacgtgttgcattttgtatgtgtgcacgtgtgctgcagattgtgtgggtgcgtgcacgtgtgttgcagattgtgtggatgtgtgcacgtgtgttgccagagctggccggtgtgtgcacacgtgttgcagattgtgtggatgtgtgcgcgtgtgttgcagattgcgtgggtgtgtgcacgtgtgttgcagattgtgtggatgtgtgcatgtgtgttgcagagtggccagtgtgcacacgtgttgcagattgtgtggatgtgtgcacgtgtgttgcagattgtgtgggtgtgtgcacgtgtgttgcagattgtgtgggtgtgtgcacgtgtgttgcagattgtgtggatgtgtgcatgtgtgttgcagagtggccggtgtgtgcacgtgttgcagactgtgtgggtgcgtgcacgtgtgttgcagattgtgtgggtgtatgcatgtgtgttgcagattgtgtggatgtgtgcatgtgtgttgcagagtggccggtgtgtgcatgtgttgcagattgtatggatgtgtgcatgtgcgttgcagagtggccggtgtgtgcacgtgttgcagactggatgtgtgcacgtgtgttgcagactgtgtgggtgcgtgcacgtgtgttgcagattgtacaggtgtgtgcatgtgtgttgcagattgtgtgggtgtgtgcacgtgtcttgcagattgtgtgggtgtgtgcacgtgtgttacagattttgtgggtgtatgcatgtgtgttgcagagcaaccggtgtgtgcacgtgttgcagattgtgtgggtgtgtgcacgtgtgttgctgattgtgtggatgtgtgcatgtgtgttgcagagcaaccagtgtgtgcacgtgtgctgcagagcagctggtacagttccggtgcccgccagtcccttggcacttcgctgagctttgccctgaactctgtgcaatcacttagccaatggggcggtggcggtagagcaggaatggaagacggtgtccgaaaacccattttaaagcttcactcttcaatgaaggatttattttcccaattaactttaaaattttattgaaacgagggtaacattttaaagttaagatgcttgtttctcaccctatctgcactccctggctcgcagctccacgcccacaggggacacagcccagcccagcccagcttctgtgtcacccgtgggttagcgtgtccctctggcaccaacacatggtgatacccacaatgctgtagcccagggtgtggcacctgggggtgggtatgggaggtacttttaattcactgctgtggcctttgcctctggctggattttttttttttttttttttttttggagacagagtcttgccctgtcacccaggctggagtgcagtggtgtgatctaggctcactgcaacctccacctcccgggttcaagtgattctcctctctcagccttccgagtagctgggactacaggtgtgtaccaccactaaccgcgcctggctaattttgctattttcagtagagatggggtttcaccatgttggccaggctggtctcaaactctgacctcctgatttccctgcaaaaagcaagacatccgtgggcagcagacacccgtggctccttcaagcagggccctggggacagcgggggacccacactgtccctgctctgccccagttcccatcaatggccactttcttagcacagcagggtggtgaatgagaaagccaggtgtgaaacccacacccccaggaggctcgctctgggctgccacctggtcacagccattcaggcccatcaggacccagtgatggctcctggcgtctggcccaggtacccgtgcccatctctggtttcctgtctgtgcagtcagaaaccaccattgaatcaaaacctgtctaggaagcctcgtcccaaacagggcttggtgtgcaggtcggtctgtctacaccagccatctgcacccagtctgtctacaccagccatctgcacccagtctgtctacacccagccatctgcacccagtctgtctacaccagccatctgcactcagtctacaccagccatctgcacccagtctgtctacacccagccatctgcacccagtctgtctacaccagccatctgcacccagtctgtctacaccagccatctgcacccagtctgtctacacccagccatctgcacccagtctgtctacaccagccatctgcacccagtctgtctacaccagccatctgcaccgtctgtctacaccagccatctgcacccagtctgtctacaccagccctgctttccactcaggcttctgtgtattttggattcttgaccctctccgctggagatgctgaagacgcttctaaggctaaaagttccgttggcccgaagttggtacaacagggtgccaggaaggaaggacggcaagggggaaggaagggagtgtgccttgcctctctgggtttctgttctacgttctttgaagagttcagcaatcaccaaaagccacatcatccctggttcctaatgcactgactttatcacctgagtagatttagagagattcccaggtcctggtgaaaagcttcacccagcaaatgtcttactcccctgaaatggttttccgattcccataaccaacccaatccacaagggaagcccactggagacgcaggacctggtggcaggggatggctgggtgctccagagtctggggtcaagctggtagtctctgtttcgaggcctcctctcttctaattccctgagcctatgtggttactgtgccagaaaggtgctgctccactccaccacactctaattcctatatccctgaagcccaggtatacaaacctggcacacctggacccaagctggtgccccagccccacccggatcactgcattgggagctagtgggccaggtggtgatgctagctgctctctgatgagccccaccgaggtccagccagagctcctggccacaccagggcaagtgcagagaaagccttggctcagttcccctcctcactgacacatgcctaccaagccccagcccagggcaacccccgtcctccagggactcacagttcagggtgaggccagacccagggcggggatgggcaggtgggataccagagtgagccctcagcagcgccctgagtctaggccagcttcccggaagaagaggcatctgagcagcacctgagggtaagaaggtctcgctgcatgagcagatgggtaagggagcacccaagactctcccaggtgaaccttcaggcctagcagccccttcttcctcctaggaaggccagggctgtccaggcttgctggaggcctcaggggcaacgtcgtgcaacttacaatggcaggacagggtggagccagggcctgggtgcccaggatggggcccagagcagaggagagcagtggatcccagaagggccaagcatggggtctctggggtccagggtccctgacagcaaacatcaagtaggccctgtccagtgagccccaggggctgtgactgatgggtacatgtggccgcctcagcagggctggcacctcctccagcaggcagagatgggcaggacctggagcagctttacagttggctgagcattaataatgagccattatgcctaaccctaaagcccgagagaggtgggtctacatccacaagtcctgctggggcagcccctgaagctgcagattccagcctcttcccatgtctgcactgagcaggccttgccgggaaaagaatcggataagaactgcatcctgcatatgagtctccacatgtgggcacacatacagtacctagacacctgcgtgcgtgcacacacacgtacatacacgagaactgcgccctgcacctcatctctcaccacacacacgtgcacacacacacacagaagctgcacgtggcacctcaatatccctgtgggcacacacgtgcacacagaactcagaaactgcagctacactcctcctgtccctgcctgtgcagccaccctgggctccggctctcacgtcaacacctacgtctgctctcagccctcaccctgctgcagggggagccactcgtaaattcagcaatgcatggagcttgcagagtggggtcctgacaaaaacctctaactgaaatttgtttcaggttttgaaatgtgagcacgctgtggacaattacaagtgcagttctacatgttcgttaaatcggccaccaagtactgttggcagatttttctgccaaactaagaacaaaataccttgaaataaataaatatgcaagtattttaatataactctgcatttaggaaggtaatttctatcatgaaatctaaacagtaaaattttaatctgaggactggaaccttcttctgcaaaacaaagggctggatgggggagctgtcaggcccccggagacagactccaacctgcccagatgcctttcctggagcagcagtactcgtgctttcctcaaggaactgaaaataactaggaggagaaccacaatatgctatgcccagttctttcacactcaaaacaagggtcctcagaatttttacagtggtgaaggccctcaacaaaaagtgtgcaagactgatgttaaccacaatcagtcctgagctgggttctttatgctgaatatgaccttagctggaagtaagggtttgttcattccaaactatggctaggcagaaaagattacaccaatctaaaagaaaatttcctatagtcttaattataccaaatctaacttttctaccattgcgtccaattagggaaattgctgccttccatcaatacctggtcccacgacagagcaggacagagaggcggcgggtgcgtgctcggctcatgggcccccccagcttctacagctgccgtatgttacagttctgcaggagagcagttgataacaaccattctttcctgcttacgtcgtcttgaaaaccattaggtagaaaaaaaaagtcctcaaaatgtgtcggcttaattagatgtacagcttctcaggtctcaaagggaaaaatgcattcttgttcctccaagggtctgctggctttgctgctagcagcacggctgaatgaaaccagaataaaccaacttcaaacgaaaagcgaattcccttttgtctgaggccagctgct

SEQ ID NO: 1766 - protein, 462 aa, Homo sapiens
MRVGGARSQRKELSQCPDGPNSCPAQGKGRFLQVGHGLRATREVLTQASCCRCCRALLAGRRKLVRQCSPSPPWHLSATLNSCQSTVAAVASNDVVSSPELCPGPPSPGPPSQPPDIRKEMAGALRCQALTLPLPDSMNSGFLFLPNVQTCADFKPEGLPVYEIMSLTEGQTVRVCARVADCVDVCTFVAEWLVCAHVLHFVCVHVCCRLCGCVHVCCRLCGCVHVCCQSWPVCAHVLQIVWMCARVLQIAWVCARVLQIVWMCACVLQSGQCAHVLQIVWMCARVLQIVWVCARVLQIVWVCARVLQIVWMCACVLQSGRCVHVLQTVWVRARVLQIVWVYACVLQIVWMCACVLQSGRCVHVLQIVWMCACALQSGRCVHVLQTGCVHVCCRLCGCVHVCCRLYREIAAFHQYLVPRQSRTERRRVRARLMGPPSFYSCRMLQFCRRAVDNNHSFLLTSS

SEQ ID NO: 1767 - DNA, 2339 bp, Homo sapiens
  source
  (1)..(2339)
  CDS (201)..(1064)
  CDS (1789)..(2139)
  modified_base (18)..(18): a, t, c, g, unknown or other
  modified_base (37)..(37): a, t, c, g, unknown or other
  modified_base (42)..(42): a, t, c, g, unknown or other
  modified_base (46)..(46): a, t, c, g, unknown or other
  modified_base (70)..(71): a, t, c, g, unknown or other
  modified_base (108)..(108): a, t, c, g, unknown or other
  modified_base (113)..(113): a, t, c, g, unknown or other
  modified_base (140)..(140): a, t, c, g, unknown or other
  modified_base (143)..(143): a, t, c, g, unknown or other
  modified_base (162)..(162): a, t, c, g, unknown or other
  modified_base (175)..(175): a, t, c, g, unknown or other
  modified_base (187)..(187): a, t, c, g, unknown or other
  modified_base (190)..(190): a, t, c, g, unknown or other
  modified_base (224)..(224): a, t, c, g, unknown or other
  modified_base (246)..(246): a, t, c, g, unknown or other
  modified_base (248)..(248): a, t, c, g, unknown or other
  modified_base (250)..(250): a, t, c, g, unknown or other
  modified_base (265)..(265): a, t, c, g, unknown or other
  modified_base (267)..(267): a, t, c, g, unknown or other
  modified_base (269)..(269): a, t, c, g, unknown or other
  modified_base (288)..(289): a, t, c, g, unknown or other
  modified_base (291)..(291): a, t, c, g, unknown or other
  modified_base (304)..(304): a, t, c, g, unknown or other
  modified_base (313)..(313): a, t, c, g, unknown or other
  modified_base (323)..(323): a, t, c, g, unknown or other
  modified_base (330)..(331): a, t, c, g, unknown or other
  modified_base (337)..(337): a, t, c, g, unknown or other
  modified_base (349)..(349): a, t, c, g, unknown or other
  modified_base (359)..(359): a, t, c, g, unknown or other
  modified_base (372)..(373): a, t, c, g, unknown or other
  modified_base (375)..(375): a, t, c, g, unknown or other
  modified_base (377)..(377): a, t, c, g, unknown or other
  modified_base (408)..(408): a, t, c, g, unknown or other
  modified_base (417)..(417): a, t, c, g, unknown or other
  modified_base (420)..(420): a, t, c, g, unknown or other
  modified_base (425)..(425): a, t, c, g, unknown or other
  modified_base (442)..(442): a, t, c, g, unknown or other
  modified_base (453)..(453): a, t, c, g, unknown or other
  modified_base (457)..(457): a, t, c, g, unknown or other
  modified_base (463)..(463): a, t, c, g, unknown or other
  modified_base (467)..(467): a, t, c, g, unknown or other
  modified_base (483)..(483): a, t, c, g, unknown or other
  modified_base (490)..(490): a, t, c, g, unknown or other
  modified_base (494)..(494): a, t, c, g, unknown or other
  modified_base (500)..(501): a, t, c, g, unknown or other
  modified_base (507)..(508): a, t, c, g, unknown or other
  modified_base (511)..(511): a, t, c, g, unknown or other
  modified_base (513)..(513): a, t, c, g, unknown or other
  modified_base (518)..(518): a, t, c, g, unknown or other
  modified_base (527)..(528): a, t, c, g, unknown or other
  modified_base (534)..(536): a, t, c, g, unknown or other
  modified_base (548)..(548): a, t, c, g, unknown or other
  modified_base (551)..(551): a, t, c, g, unknown or other
  modified_base (557)..(557): a, t, c, g, unknown or other
  modified_base (560)..(560): a, t, c, g, unknown or other
  modified_base (564)..(566): a, t, c, g, unknown or other
  modified_base (582)..(582): a, t, c, g, unknown or other
  modified_base (585)..(585): a, t, c, g, unknown or other
  modified_base (588)..(588): a, t, c, g, unknown or other
  modified_base (598)..(598): a, t, c, g, unknown or other
  modified_base (605)..(605): a, t, c, g, unknown or other
  modified_base (607)..(607): a, t, c, g, unknown or other
  modified_base (616)..(616): a, t, c, g, unknown or other
  modified_base (624)..(625): a, t, c, g, unknown or other
  modified_base (633)..(633): a, t, c, g, unknown or other
  modified_base (637)..(637): a, t, c, g, unknown or other
  modified_base (641)..(642): a, t, c, g, unknown or other
  modified_base (649)..(651): a, t, c, g, unknown or other
  modified_base (660)..(660): a, t, c, g, unknown or other
  modified_base (667)..(667): a, t, c, g, unknown or other
  modified_base (675)..(675): a, t, c, g, unknown or other
  modified_base (685)..(685): a, t, c, g, unknown or other
  modified_base (687)..(688): a, t, c, g, unknown or other
  modified_base (692)..(692): a, t, c, g, unknown or other
  modified_base (704)..(705): a, t, c, g, unknown or other
  modified_base (709)..(709): a, t, c, g, unknown or other
  modified_base (717)..(718): a, t, c, g, unknown or other
  modified_base (720)..(721): a, t, c, g, unknown or other
  modified_base (724)..(725): a, t, c, g, unknown or other
  modified_base (727)..(727): a, t, c, g, unknown or other
  modified_base (734)..(734): a, t, c, g, unknown or other
  modified_base (739)..(739): a, t, c, g, unknown or other
  modified_base (749)..(749): a, t, c, g, unknown or other
  modified_base (752)..(753): a, t, c, g, unknown or other
  modified_base (756)..(756): a, t, c, g, unknown or other
  modified_base (761)..(765): a, t, c, g, unknown or other
  modified_base (776)..(776): a, t, c, g, unknown or other
  modified_base (780)..(781): a, t, c, g, unknown or other
  modified_base (795)..(795): a, t, c, g, unknown or other
  modified_base (797)..(797): a, t, c, g, unknown or other
  modified_base (803)..(805): a, t, c, g, unknown or other
  modified_base (811)..(813): a, t, c, g, unknown or other
  modified_base (815)..(815): a, t, c, g, unknown or other
  modified_base (821)..(821): a, t, c, g, unknown or other
  modified_base (824)..(824): a, t, c, g, unknown or other
  modified_base (830)..(830): a, t, c, g, unknown or other
  modified_base (832)..(832): a, t, c, g, unknown or other
  modified_base (834)..(834): a, t, c, g, unknown or other
  modified_base (837)..(837): a, t, c, g, unknown or other
  modified_base (840)..(841): a, t, c, g, unknown or other
  modified_base (846)..(846): a, t, c, g, unknown or other
  modified_base (848)..(849): a, t, c, g, unknown or other
  modified_base (853)..(854): a, t, c, g, unknown or other
  modified_base (857)..(859): a, t, c, g, unknown or other
  modified_base (863)..(863): a, t, c, g, unknown or other
  modified_base (881)..(883): a, t, c, g, unknown or other
  modified_base (886)..(886): a, t, c, g, unknown or other
  modified_base (891)..(891): a, t, c, g, unknown or other
  modified_base (893)..(893): a, t, c, g, unknown or other
  modified_base (911)..(911): a, t, c, g, unknown or other
  modified_base (915)..(915): a, t, c, g, unknown or other
  modified_base (923)..(925): a, t, c, g, unknown or other
  modified_base (927)..(927): a, t, c, g, unknown or other
  modified_base (932)..(933): a, t, c, g, unknown or other
  modified_base (936)..(938): a, t, c, g, unknown or other
  modified_base (941)..(942): a, t, c, g, unknown or other
  modified_base (952)..(954): a, t, c, g, unknown or other
  modified_base (958)..(958): a, t, c, g, unknown or other
  modified_base (964)..(964): a, t, c, g, unknown or other
  modified_base (968)..(968): a, t, c, g, unknown or other
  modified_base (970)..(971): a, t, c, g, unknown or other
  modified_base (978)..(978): a, t, c, g, unknown or other
  modified_base (994)..(994): a, t, c, g, unknown or other
  modified_base (1003)..(1003): a, t, c, g, unknown or other
  modified_base (1006)..(1006): a, t, c, g, unknown or other
  modified_base (1009)..(1009): a, t, c, g, unknown or other
  modified_base (1011)..(1013): a, t, c, g, unknown or other
  modified_base (1018)..(1018): a, t, c, g, unknown or other
  modified_base (1023)..(1023): a, t, c, g, unknown or other
  modified_base (1028)..(1028): a, t, c, g, unknown or other
  modified_base (1035)..(1035): a, t, c, g, unknown or other
  modified_base (1038)..(1038): a, t, c, g, unknown or other
  modified_base (1043)..(1043): a, t, c, g, unknown or other
  modified_base (1045)..(1045): a, t, c, g, unknown or other
  modified_base (1047)..(1047): a, t, c, g, unknown or other
  modified_base (1051)..(1051): a, t, c, g, unknown or other
  modified_base (1053)..(1053): a, t, c, g, unknown or other
  modified_base (1056)..(1057): a, t, c, g, unknown or other
  modified_base (1071)..(1071): a, t, c, g, unknown or other
  modified_base (1074)..(1076): a, t, c, g, unknown or other
  modified_base (1079)..(1080): a, t, c, g, unknown or other
  modified_base (1083)..(1083): a, t, c, g, unknown or other
  modified_base (1088)..(1088): a, t, c, g, unknown or other
  modified_base (1100)..(1100): a, t, c, g, unknown or other
  modified_base (1106)..(1106): a, t, c, g, unknown or other
  modified_base (1108)..(1108): a, t, c, g, unknown or other
  modified_base (1112)..(1113): a, t, c, g, unknown or other
  modified_base (1116)..(1117): a, t, c, g, unknown or other
  modified_base (1121)..(1121): a, t, c, g, unknown or other
  modified_base (1123)..(1123): a, t, c, g, unknown or other
  modified_base (1126)..(1127): a, t, c, g, unknown or other
  modified_base (1129)..(1130): a, t, c, g, unknown or other
  modified_base (1132)..(1134): a, t, c, g, unknown or other
  modified_base (1136)..(1136): a, t, c, g, unknown or other
  modified_base (1139)..(1139): a, t, c, g, unknown or other
  modified_base (1142)..(1142): a, t, c, g, unknown or other
  modified_base (1161)..(1163): a, t, c, g, unknown or other
  modified_base (1166)..(1166): a, t, c, g, unknown or other
  modified_base (1169)..(1169): a, t, c, g, unknown or other
  modified_base (1172)..(1172): a, t, c, g, unknown or other
  modified_base (1196)..(1196): a, t, c, g, unknown or other
  modified_base (1202)..(1203): a, t, c, g, unknown or other
  modified_base (1227)..(1227): a, t, c, g, unknown or other
  modified_base (1242)..(1242): a, t, c, g, unknown or other
  modified_base (1245)..(1245): a, t, c, g, unknown or other
  modified_base (1251)..(1251): a, t, c, g, unknown or other
  modified_base (1269)..(1269): a, t, c, g, unknown or other
  modified_base (1271)..(1271): a, t, c, g, unknown or other
  modified_base (1275)..(1275): a, t, c, g, unknown or other
  modified_base (1279)..(1279): a, t, c, g, unknown or other
  modified_base (1318)..(1319): a, t, c, g, unknown or other
  modified_base (1326)..(1326): a, t, c, g, unknown or other
  modified_base (1329)..(1329): a, t, c, g, unknown or other
  modified_base (1336)..(1336): a, t, c, g, unknown or other
  modified_base (1421)..(1421): a, t, c, g, unknown or other
  modified_base (1430)..(1430): a, t, c, g, unknown or other
  modified_base (1439)..(1439): a, t, c, g, unknown or other
  modified_base (1443)..(1443): a, t, c, g, unknown or other
  modified_base (1448)..(1448): a, t, c, g, unknown or other
  modified_base (1453)..(1453): a, t, c, g, unknown or other
  modified_base (1459)..(1459): a, t, c, g, unknown or other
  modified_base (1468)..(1468): a, t, c, g, unknown or other
  modified_base (1481)..(1483): a, t, c, g, unknown or other
  modified_base (1486)..(1486): a, t, c, g, unknown or other
  modified_base (1496)..(1496): a, t, c, g, unknown or other
  modified_base (1498)..(1498): a, t, c, g, unknown or other
  modified_base (1500)..(1500): a, t, c, g, unknown or other
  modified_base (1517)..(1517): a, t, c, g, unknown or other
  modified_base (1556)..(1556): a, t, c, g, unknown or other
  modified_base (1558)..(1558): a, t, c, g, unknown or other
  modified_base (1560)..(1561): a, t, c, g, unknown or other
  modified_base (1565)..(1565): a, t, c, g, unknown or other
  modified_base (1569)..(1569): a, t, c, g, unknown or other
  modified_base (1581)..(1581): a, t, c, g, unknown or other
  modified_base (1590)..(1590): a, t, c, g, unknown or other
  modified_base (1601)..(1601): a, t, c, g, unknown or other
  modified_base (1607)..(1607): a, t, c, g, unknown or other
  modified_base (1611)..(1611): a, t, c, g, unknown or other
  modified_base (1614)..(1614): a, t, c, g, unknown or other
  modified_base (1619)..(1620): a, t, c, g, unknown or other
  modified_base (1625)..(1625): a, t, c, g, unknown or other
  modified_base (1630)..(1631): a, t, c, g, unknown or other
  modified_base (1636)..(1636): a, t, c, g, unknown or other
  modified_base (1643)..(1643): a, t, c, g, unknown or other
  modified_base (1659)..(1659): a, t, c, g, unknown or other
  modified_base (1665)..(1665): a, t, c, g, unknown or other
  modified_base (1669)..(1669): a, t, c, g, unknown or other
  modified_base (1690)..(1690): a, t, c, g, unknown or other
  modified_base (1701)..(1701): a, t, c, g, unknown or other
  modified_base (1730)..(1730): a, t, c, g, unknown or other
  modified_base (1756)..(1756): a, t, c, g, unknown or other
  modified_base (1799)..(1799): a, t, c, g, unknown or other
  modified_base (1820)..(1820): a, t, c, g, unknown or other
  modified_base (1824)..(1824): a, t, c, g, unknown or other
  modified_base (1836)..(1836): a, t, c, g, unknown or other
  modified_base (1848)..(1848): a, t, c, g, unknown or other
  modified_base (1860)..(1860): a, t, c, g, unknown or other
  modified_base (1865)..(1865): a, t, c, g, unknown or other
  modified_base (1868)..(1868): a, t, c, g, unknown or other
  modified_base (1880)..(1880): a, t, c, g, unknown or other
  modified_base (1887)..(1887): a, t, c, g, unknown or other
  modified_base (1893)..(1893): a, t, c, g, unknown or other
  modified_base (1908)..(1908): a, t, c, g, unknown or other
  modified_base (1912)..(1912): a, t, c, g, unknown or other
  modified_base (1916)..(1916): a, t, c, g, unknown or other
  modified_base (1922)..(1922): a, t, c, g, unknown or other
  modified_base (1927)..(1927): a, t, c, g, unknown or other
  modified_base (1947)..(1947): a, t, c, g, unknown or other
  modified_base (1957)..(1957): a, t, c, g, unknown or other
  modified_base (1980)..(1980): a, t, c, g, unknown or other
  modified_base (1995)..(1995): a, t, c, g, unknown or other
  modified_base (1997)..(1997): a, t, c, g, unknown or other
  modified_base (2026)..(2026): a, t, c, g, unknown or other
  modified_base (2038)..(2038): a, t, c, g, unknown or other
  modified_base (2056)..(2056): a, t, c, g, unknown or other
  modified_base (2062)..(2062): a, t, c, g, unknown or other
  modified_base (2097)..(2097): a, t, c, g, unknown or other
  modified_base (2101)..(2101): a, t, c, g, unknown or other
  modified_base (2110)..(2110): a, t, c, g, unknown or other
  modified_base (2115)..(2115): a, t, c, g, unknown or other
  modified_base (2123)..(2123): a, t, c, g, unknown or other
  modified_base (2153)..(2153): a, t, c, g, unknown or other
  modified_base (2157)..(2157): a, t, c, g, unknown or other
  modified_base (2205)..(2205): a, t, c, g, unknown or other
  modified_base (2235)..(2235): a, t, c, g, unknown or other
  modified_base (2246)..(2246): a, t, c, g, unknown or other
  modified_base (2267)..(2267): a, t, c, g, unknown or other
  modified_base (2270)..(2271): a, t, c, g, unknown or other
  modified_base (2281)..(2281): a, t, c, g, unknown or other
  modified_base (2286)..(2286): a, t, c, g, unknown or other
  modified_base (2294)..(2339): a, t, c, g, unknown or other
gctggcgactcggtctcncaaccctctctaattcttntaatngcgncccgggcggggttctgtccgggtnntgctccttctcgcttgggtgtgtgtgtgcgggtgtgngtgtnggttagtggcggggttggtggtcgctnggnttttcaaatcggcctggcncccactgttgcangggggtgcgccntcngctcttccgtatgcctggcgggtgctgtggggtntctgtgtctctgtcccgtcgcngncnctcgccgcgttctgngncnccgggggagttgcttcggnncnctcctccgcctgncgccccaangggggttcgnggtcctnnccccgncttgctcccctngtgccctccncgtggcttcctcnncngnttggttgtacctctttttgtccttcctccgntcctgcctntcncttgngtcttcgcccgtggtcngctccgggtgntcgnctcgcnccgncgggccgcttgccgcngggtcgncttnttcctnnttccgnnctngnggggntgggtgcgnngctgtnnntccgcgtccctnctnctctgntgntctnnnttggttgtttttctgncgngcnggggcgctcntctcgtngnttgtttggncggttcgnntccctttngggntggnngggggtnnnttcgtttgntgtggtntctggccnggctgccgcncnncctntttttttccttnncgcntcggcttnncnncgnntntttttcntgtcngtttcgtccngcnntgncttcnnnnntctgttttctnctcnnctttccccctgccntngtttgnnntcctgnnngnttctcnccnctcctncncnggncgnnttggncnngccnnccnnntgcnttgcgtgtcccgtctccnnnctntggcngncgttccccctttttccgntccntttttctnnncnggctnnggnnngtnngtccccccgnnncgtngcgctncccngnntgccccnccgcggtccccccttngttctttcntgnttncnnncctcncgccngcccntcctcgntgntggcngntnctcngntgnntcccgccgtgggtntgnnngtnnccncgcgntttcccccgggntgtgcngngccnncgnntgcntntgnncnncnnngnttnaantataataaaaaataaaatnnnctngtncgnggtcgggcccgctcgggccccccngggggnngcgggggggggggggggggcgcgntgtggccctgtgggnctncttcgncgctggtttctctctctncngcgntctncctccgcgctccccccctccctctcgctccccccgtctnnctcctcntcncgctctnaataaaaaaaaaaaaaaaaaaaatcccctccccgcccccccccccctctgcgggggggggggggggggggcgcgttctcgtctcntctcgctgnctcctggcncgtnccccngctcncttctntgtgtcgcntcccctcctctcnnnctngcgtcccctntntncggccgccgggctgtcntcccccgttttgtttgtctcttcttgctggtctcccgcngntnnctcncttngtggggtccttngcctgtctncgctccccttncctgcncgcncgncgttnncctcntgtcnntctcncgctctngccgtcctgctttgcnttgctntgcncggctctctctcgcgtttgcntcctttctgtngcgctgtctgtggctgccgtcttctgcgnggtctcgtttctctttgtccgtcccntgctttgcgtcgtctttcttttcgctgcgtaggtcgtgcttgntctctctgtgtgctttctcgnctcngttttgggtctnccttcttcttcncttttctctgtntttcngcnctgttcttgctntgtcgtnctgctntccgcgtgctgcttncttntcgntgcgcngttcntgttctcttgcggcgtgctnttgttctctngtccctccgctccttgtgtcggngcgtctgtgttctcncngcgctcgttccgtcgtcgttctgctcgcntggtcgtgggcnttccgcctgcgcctcgcncgcgtngcaagcctcacctaactaacgccgcctgctgcgtngctncttgctctngcgtngactacangtcgagcatgctataagtacccaacttacntctngtgcactaacaatgatacagaagcactacagtgacgacgttaaataantcacgagctagattagataaacataaaaangaagtaaaaantaagattaaagaagaaaaaanatnnaaaaaaaaanaaaanaaaaaaannnnnnnnnnnnnnnnnnnnnnnnnnnnnnnnnnnnnnnnnnnnnn

SEQ ID NO: 1768 - protein, 404 aa, Homo sapiens
  MOD_RES (16)..(17): Variable amino acid
  MOD_RES (22)..(23): Variable amino acid
  MOD_RES (30)..(31): Variable amino acid
  MOD_RES (35)..(35): Variable amino acid
  MOD_RES (38)..(38): Variable amino acid
  MOD_RES (44)..(44): Variable amino acid
  MOD_RES (46)..(46): Variable amino acid
  MOD_RES (50)..(50): Variable amino acid
  MOD_RES (58)..(59): Variable amino acid
  MOD_RES (70)..(70): Variable amino acid
  MOD_RES (73)..(75): Variable amino acid
  MOD_RES (81)..(81): Variable amino acid
  MOD_RES (85)..(86): Variable amino acid
  MOD_RES (88)..(88): Variable amino acid
  MOD_RES (95)..(95): Variable amino acid
  MOD_RES (97)..(98): Variable amino acid
  MOD_RES (101)..(101): Variable amino acid
  MOD_RES (103)..(105): Variable amino acid
  MOD_RES (110)..(110): Variable amino acid
  MOD_RES (112)..(112): Variable amino acid
  MOD_RES (119)..(120): Variable amino acid
  MOD_RES (122)..(122): Variable amino acid
  MOD_RES (128)..(130): Variable amino acid
  MOD_RES (133)..(133): Variable amino acid
  MOD_RES (136)..(136): Variable amino acid
  MOD_RES (139)..(139): Variable amino acid
  MOD_RES (142)..(142): Variable amino acid
  MOD_RES (145)..(146): Variable amino acid
  MOD_RES (148)..(148): Variable amino acid
  MOD_RES (150)..(151): Variable amino acid
  MOD_RES (154)..(154): Variable amino acid
  MOD_RES (156)..(156): Variable amino acid
  MOD_RES (159)..(159): Variable amino acid
  MOD_RES (162)..(163): Variable amino acid
  MOD_RES (168)..(170): Variable amino acid
  MOD_RES (173)..(176): Variable amino acid
  MOD_RES (180)..(180): Variable amino acid
  MOD_RES (185)..(186): Variable amino acid
  MOD_RES (188)..(189): Variable amino acid
  MOD_RES (194)..(194): Variable amino acid
  MOD_RES (199)..(199): Variable amino acid
  MOD_RES (201)..(202): Variable amino acid
  MOD_RES (204)..(205): Variable amino acid
  MOD_RES (211)..(214): Variable amino acid
  MOD_RES (216)..(218): Variable amino acid
  MOD_RES (220)..(220): Variable amino acid
  MOD_RES (228)..(229): Variable amino acid
  MOD_RES (231)..(231): Variable amino acid
  MOD_RES (239)..(239): Variable amino acid
  MOD_RES (242)..(243): Variable amino acid
  MOD_RES (245)..(246): Variable amino acid
  MOD_RES (248)..(248): Variable amino acid
  MOD_RES (251)..(253): Variable amino acid
  MOD_RES (255)..(255): Variable amino acid
  MOD_RES (257)..(257): Variable amino acid
  MOD_RES (260)..(260): Variable amino acid
  MOD_RES (265)..(265): Variable amino acid
  MOD_RES (268)..(271): Variable amino acid
  MOD_RES (273)..(273): Variable amino acid
  MOD_RES (275)..(275): Variable amino acid
  MOD_RES (279)..(280): Variable amino acid
  MOD_RES (282)..(286): Variable amino acid
  MOD_RES (292)..(292): Variable amino acid
  MOD_RES (299)..(299): Variable amino acid
  MOD_RES (314)..(315): Variable amino acid
  MOD_RES (319)..(319): Variable amino acid
  MOD_RES (328)..(328): Variable amino acid
  MOD_RES (330)..(331): Variable amino acid
  MOD_RES (333)..(333): Variable amino acid
  MOD_RES (335)..(335): Variable amino acid
  MOD_RES (345)..(345): Variable amino acid
  MOD_RES (358)..(358): Variable amino acid
  MOD_RES (368)..(368): Variable amino acid
  MOD_RES (372)..(372): Variable amino acid
  MOD_RES (378)..(378): Variable amino acid
  MOD_RES (380)..(380): Variable amino acid
  MOD_RES (393)..(393): Variable amino acid
  MOD_RES (396)..(396): Variable amino acid
  MOD_RES (400)..(400): Variable amino acid
MPGGCCGVSVSLSRRXXSPRSXXPGELLRXXPPPXAPXGVRGPXPXLLPXCPPRGFLXXLVVPLFVLPPXLPXXXVFARGXLRVXXSXRRAACRXVXXFLXPXXXGWVRXCXSASLLLXXSXLVVFLXXXGAXLVXCLXGSXPFXXGXGXXRLXWXLAXLPXXLFFSXXXRLXXXXFSCXFRPAXXSXXCFLLXFPPAXVXXPXXFSPLLXXXXWXXXPXALRVPSPXXGXRSPFFRSXFLXXLXXVXPPXXXRXPXCPXAVPPXFFXXXXPXAXPSSXXAXXXXXPAVVLXLSVCFLXSVLGLPSSSLFSVFXXCSCXVVLLSACCXLXXAXFXFSCGVLLFSXPSAPCVGASVFSXRSFRRRSARXVVGXPPAPRXRXKPHLTNAACCVAXCSXVDYXSSML

SEQ ID NO: 1769 - DNA, 1594 bp, Homo sapiens
  source
  (1)..(1594)
  CDS (201)..(1394)
attgatttagttgcaatgtttgataattagaatattataatgcttgtgctatgtaaaatagactcaccccctttctgataagtgaacttttttttttaataagtaagtaactgtttaacttaaataatttttcccatctttcatcgacaggtggtaacgtccttatcttggctatttggggggacaaaggagccccacatatgcaggccttacacttctcttttgccttgggtgcctttttggctccactgctagctaaactggctttgggtccgacagcgtctgctgaaaaccacacagagtctgacttccatcctgcactcaaccaatcatctgatgctgactcagaagctctgtttggagtacctaatgataagaatttactgtgggcttatgctgttatcggtacttacatgttcttagtttctgtcatttttttttgtctgtttttaaagaatagctcaaagcaagaaaaagcaagagcatctgctgagacatttcgaagagcaaaatatcacaacgcccttctttgtctcctttttctgttcttctttttttatgttggagctgaggtaacatatggctcttatgttttctcatttgcaaccacccatgctggcatgaaagaaagtgaagctgctgggttgaactccatcttctgggggacatttgcagcctgcaggggcctggcaatcttttttgctacctgtttacagcctggaaccatgattgtgttgagcaacattggcagcctgacttcatctttatttctggtgctttttgacaagaacccaatttgtctctggatagcaacttcagtgtatggggcttcaatggcaaccacatttccgagtggtgtttcttggattgagcagtacacgaccatccatgggaaatctgcagcattttttgtaattggtgcttccctgggagaaatggctattcctgcagtcattggaattcttcaaggaaaataccctgatttgcctgtagttctgtatacctctttgggagcatcaatagctactggtattttatttcctgtgctatataaattagccacttcacctcttgatcgccagcgaaaagaagacagaaagagtgaggaccagaaagctctgctctctagctccgggctaaatgaatatgaggaagagaatgaagaggaggatgcagaaaaatggaatgaaatggattttgaaatgattgaaacgaatgatacaatgaggcattctataatagagacatctagaagtagtctgacggagcccacagctgaagtctataatcaatacccatcaaatgcactggtgtttgagtcttctccttttaatactggcagtgcccatgtgaagcacttgccagaaaccaggacaaaagggactaacgtttagagaagatggattactcactgacatctttgaataactgccacttctaaggacgccattcagagcagagcattagcagaatttcaccatgctttggggattaaaatttttaggtccatattatagcaaatgctaaaaatttttgaaatgttctgtaattcccagagtcttccataaataaccaaatggtctcatacacgtac

SEQ ID NO: 1770 - protein, 397 aa, Homo sapiens [sequence omitted]

SEQ ID NO: 1771 - DNA, 1210 bp, Homo sapiens
  source
  (1)..(1210)
  CDS (201)..(1010)
ggtggcttatgtctgtaatctcagcatttcgagaggctgaggtgggagaattgcttaagaccagaagtcaagaccagcctagacagcataggcagaccccatctctacaaaaaaataaaaataagctgggcatggtggcatgtgcctgtggttggaaggctaggtgcgagatcgcttgagcccaggagatcgaggctgtaatgagacatgatcatgtgactgcactccagcctgtgagactttgtctcaaaaaaaatatatatatgtatatattcatatacatatatatgtgtgtacatattcatatacatatatgtgtgtacatattcatatacatatatatgtgtgtatatattcatatacatatatatgtgtgtatatattcatatacatatatatgtgtgtatgtattcatatacatacgtgtgtatgtattcatatacatacgtgtgtatgtattcatatacatacgtgtgtgtgtattcatatacatacgtgtgtgtgtattcatatacatacgtgtgtgtgtattcatatacatacgtgtgtgtgtattcatatacatacgtgtgtgtgtattcatatacatatgtgtgtgtgtattcatatacatatgtgtgtgtattcatatatgtgtgtattcatatacatgtgtgtgtattcatatacatgtgtgtgtatatatatttgtatacatatacatgtgtatatatattcgtatacatatacatgtgtatatatattcgtatacatacatgtgtatatatattcgtatacatacatgtgtatatatattcgtatacatatatgtgtatatatattcgtatacatacatgtatatatattcgtatacatatatgtgtatatatattcgtatacatgtatgtgtatatattcgtatacatatatatgtgtatatatattcgtatacatgtatgtgtatctatatacccatatatatacccatatacatatatatacacacacccatatgcatatatataaaatagtattttaaccatcaatttgaatattttaaaatatagatctgcttattttaggatttattttttcacatttttaaaataagagtgtagttaatataaagagattttacaaagattaaaaatactatttagaggtagcatctttctaatttactccattcccacaatttcttctgtatgtagatggatatgttgaatgcaag

SEQ ID NO: 1772 - protein, 269 aa, Homo sapiens
MRHDHVTALQPVRLCLKKNIYMYIFIYIYMCVHIHIHICVYIFIYIYMCVYIHIHIYVCIYSYTYICVYVFIYIRVYVFIYIRVYVFIYIRVCVFIYIRVCVFIYIRVCVFIYIRVCVFIYIRVCVFIYICVCVFIYICVCIHICVYSYTCVCIHIHVCVYIFVYIYMCIYIRIHIHVYIYSYTYMCIYIRIHTCVYIFVYIYVYIYSYTYMYIYSYTYMCIYIRIHVCVYIRIHIYVYIYSYTCMCIYIPIYIPIYIYIHTPICIYIK

SEQ ID NO: 1773 - DNA, 1363 bp, Homo sapiens
  source
  (1)..(1363)
  CDS (201)..(1163)
caatatcgttaaatgcattatgctctagaaagagtaaggctttacttgttctagccaaaattagtttaaacagtaacacagcagttcattctcatctggttatactgaatatcaaatagcctaaactttccatttctctttaatattcttgttactagaaattgttgactataaagacctatatatatgtgtgtgtatatatgtacatatatgtatatgtgtgtatatatctacatatatgtatatgcgtgtatatatgcacatatatgtatatgcgtgtatatatgtacatatatgtatatgcgtgtatatatgcacatatatgtatatgcgtgtatatatccacatataagtatatgcgcgtatacatgtacatatatgtgtatgtgtatatatgtacatatatgtgtatatacgtgtatatatgtacatatatgtgtatatacatgtgtatatgtacatatctgtatatatgtatatgtgtatatacgtggtatgtacacgtatatacacatatatacatatgcgcatatacgtacatatatgcacatggcgcatatacgtacatatatgtacatatgcgcatatacgtgtatatatgcacatgcgcacacgtgtacatgcatgtgcatatgggcatatgtgtacacatgtgtacatgtgtgtacatatgtgtgcgtgtgtgtacgtgtgtgcatgtgtgtatatatgtgcatatgtgtacatgtgtgtatatagtgtacatgtgtgtatatatgtgcatatatgtatgtgtatatatgtacacatatatgtatatgtgcgtatatgtacatatatgtatatgtgtgtatataggtgtatatgtgtatatatacgtatatatgtatatgtgtacatacgtatatacgtatgtgtgtatacacatatgtatgtgtgtatacacacatatacgtatatgtgtgtatatatgtacatatatgcgtgtgtatatatgtacatatatgcatatgtgtatatatgtacatatatgcatatgtgtatatatgtacatatatgcatatgtgtatatatgtacatatatgcgtatgtgtgtatatatgtacatatatatgcgtatgtgcgtatatatgtacatatatgtatatatgtgtacacacatttatatacatgtaagtaagtagctgggcacggtggctcacacttgtaaccccagcactttgggaggctgaggtgggcatatcatgaggtcaagagattgagaccatcctggcaaacatggcgagaacccacctctactaaaaatacaaaaattagctgggtgtggtggcacgtgcctgaaatcccaaatacttgggaggctgaggcaggagaatcgcttgaa

SEQ ID NO: 1774 - protein, 320 aa, Homo sapiens
MYIYVYVCIYLHICICVYICTYMYMRVYMYIYVYACIYAHICICVYISTYKYMRVYMYIYVYVYICTYMCIYVYICTYMCIYMCICTYLYICICVYTWYVHVYTHIYICAYTYIYAHGAYTYIYVHMRIYVYICTCAHVYMHVHMGICVHMCTCVYICVRVCTCVHVCIYVHMCTCVYIVYMCVYMCIYVCVYMYTYMYMCVYVHICICVYIGVYVYIYVYMYMCTYVYTYVCIHICMCVYTHIRICVYICTYMRVYICTYMHMCIYVHICICVYMYIYAYVYICTYMRMCVYMYIYMRMCVYMYIYVYMCTHIYIHVSK

SEQ ID NO: 1775 - DNA, 922 bp, Homo sapiens
  source
  (1)..(922)
  CDS (201)..(722)
tatacagcatgtgtatatattgatatagtaatatactgatatattaaatatatgatatatacatatacatcaatatattactatatcatgtaatatatgtttatgtatagtatacatgtacctatacatagatatactatacaataaacatatatagtgtatatatacatgtattttatatatacatcatatatgtgtgtatgtatacaatatacacatttagtgtatataggcatatattttatatatttacatcatatatgtatattgtatatatacacattatatacaataaaaatatatgtatatatgcactatatacaatatacatatatagtgcctatatatttttatataatacatcatattatattgtatatatgtatatgcatgtatattgtatatatacactatatatgtatatacatcatatatgtaatatatcacatatagttaacatatgtatatgtctatatatgtatatagtatatatgcataaattatgttatgtatatatgtgttatatattaagtaaatatctccatatagtatacataatacataaatatacacatatgtatatatttaatctcttttttttcaattttttaaattttactttaagttctgggatacatgtgcagaatgtacaggcttgttacatagttatacatgtgccatggtggtttgctgcacctgtcaacctgtcatctaggttttaagccccgcatgcattaggtatttttcctaatgctctccctcctgttgcactccgccctgcaacaggccccggtgtgtgatgttcccctccctgtctccatgtgttctcactgttcaactcactgcggtgtttggtttcctgttcctgtgtcagtttgctgagaatgatggcttccagcttcatccatgtccctgcaaagaa

SEQ ID NO: 1776 - protein, 173 aa, Homo sapiens [sequence omitted]

SEQ ID NO: 1777 - DNA, 1300 bp, Homo sapiens
  source
  (1)..(1300)
  CDS (201)..(1100)
tccagacttaggaggggagaagaaacttctacagaggaaccaaaaagtgtatattttcctttgaatcacttaggcataatcctgaagagagagaggtcaatttttgtctaccttttcattatcttgcttattgtctcctttgtctctaccttccccaacaggtgtcttatctgacttggggtgtgctgcaggaaagagtgatgacccgcagctatggggccacagccacatcaccgggtgagcgctttacggactcgcagttcctggtgctaatgaaccgagtgctggcactgattgtggctggcctctcctgtgttctctgcaagcagccccggcatggggcacccatgtaccggtactcctttgccagcctgtccaatgtgcttagcagctggtgccaatacgaagctcttaagttcgtcagcttccccacccaggtgctggccaaggcctctaaggtgatccctgtcatgctgatgggaaagcttgtgtctcggcgcagctacgaacactgggagtacctgacagccaccctcatctccattggggtcagcatgtttctgctatccagcggaccagagccccgcagctccccagccaccacactctcaggcctcatcttactggcaggttatattgcttttgacagcttcacctcaaactggcaggatgccctgtttgcctataagatgtcatcggtgcagatgatgtttggggtcaatttcttctcctgcctcttcacagtgggctcactgctagaacagggggccctactggagggaacccgcttcatggggcgacacagtgagtttgctgcccatgccctgctactctccatctgctccgcatgtggccagctcttcatcttttacaccattgggcagtttggggctgccgtcttcaccatcatcatgaccctccgccaggcctttgccatccttctttcctgccttctctatggccacactgtcactgtggtgggagggctgggggtggctgtggtctttgctgccctcctgctcagagtctacgcgcggggccgtctaaagcaacggggaaagaaggctgtgcctgttgagtctcctgtgcagaaggtttgagggtggaaagggcctgaggggtgaagtgaaataggaccctcccaccatccccttctgctgtaacctctgagggagctggctgaaagggcaaaatgcaggtgttttctcagtatcacagaccagctctgcagcaggggattggggagcccaggaggcagccttcccttttgccttaagtcacccatcttccagtaagcagt

SEQ ID NO: 1778 - protein, 299 aa, Homo sapiens
MTRSYGATATSPGERFTDSQFLVLMNRVLALIVAGLSCVLCKQPRHGAPMYRYSFASLSNVLSSWCQYEALKFVSFPTQVLAKASKVIPVMLMGKLVSRRSYEHWEYLTATLISIGVSMFLLSSGPEPRSSPATTLSGLILLAGYIAFDSFTSNWQDALFAYKMSSVQMMFGVNFFSCLFTVGSLLEQGALLEGTRFMGRHSEFAAHALLLSICSACGQLFIFYTIGQFGAAVFTIIMTLRQAFAILLSCLLYGHTVTVVGGLGVAVVFAALLLRVYARGRLKQRGKKAVPVESPVQKV

SEQ ID NO: 1779 - DNA, 2614 bp, Homo sapiens
  source
  (1)..(2614)
  CDS (201)..(2414)
aggctgacttcccaatctatgtctccaactcaacctctcccatcagctccaccctgacgttccagcttagatttcccatcaacagcagaagttccaccatttcagaatgagcccatttgcccctaagctcagacctatatgctgagtctgtctacctgctggagactgtcctgtttctcctctatgctgagtctgtctacctggtgcagactgtcctgtttctcctctatgctgagtctgtctacctggtggagactgtcctgtttctcctctatgctgagtctgtctacctggtggatactgtcctgtttctcctctatgctaagtctgtcaacctggtggagactgtcctgtttctcctctgtgctgagtctgtctacctgctggagactgtcctgtttctcctctatgctgagtctgtctacacggtggagaccgtcctgtttctcctctgtgctgagtctgtctacctcgtggagactgtcctgtttcttctctatgctgagcctgtctacacggtggagactgtcctgtttctcctctatgctgagtctgtctacacggtggagaccgtcctgtttctcctctatgctgagcctgtctacctggtggagactgtcctgtttcttctctatgctgagcctgtctacacggtggagactgtcctgtttctcctctatgctgagtctgtctacacggtggagactgtcctgtttctcctctatgctgagtctgtctacacggtggagactgtcctgtttctcctctatgctgagtctgtctacctggtggagactgttctgtttctcctctatgctgagtctgtctacatggtggagaccaccctgtttctcctctgtgctgagtctgtctacctggtggagactgtcctgtttcttctctatgctgagcctgtctacacagtggagactgtcctgtttctcctctatgctgagtctgtctacacggtggagaccgtcctgtttctcctctgtactgagtctgtctacctggtggagactgtcctgtttcttctctatgctgagcctgtctacacggtggagactgtcctgtttctcctctatgctgagtctgtctacacggtggagaccgtcctgtttctcctctatgctgagcctgtctacctggtggagactgtcctgtttcttctctatgctgagcctgtctacacggtggagaccgtcctgtttctcctctatgctgagcctgtctacctggtggagactgtcctgtttctcctctatgctgagtctgtctacctggtggagactgtcctgtttctcctctatgctgagtctgtctacacggtggagactgtcctgtttctcctctatgctgagcctgtctacatggtggagactgtcctgtttctcctctatgctgagcctgtctacacggtggagactgtcctgtttctcctatatgctgagtctgtctacctggtggagactgtcttgtttctcctctgtgctgagcctgtctacatggtggagactgtcctgtttctcctctatgctgagcctgtctacacggtggagactgtcctgtttctcctctgtgctgagtctgtctacatggtggaaaccgtcgtgtttctcctctatgctgagcctgtctacacggtggagactgtcctgtttctcctgtatgctgagcctgtctgcatggtggaaactgtcctgtttctcctctatgctgagtctgtctacctggtggagactgtcctgtttctcctctatgctgagcctgtctacatggtggagactgtcctgtttctcctctgtgctgagtctgtctacctggtggatactgtcctgtttctcctctatgctcagtctgtcaacctggtggagactgtcctgtttctcctctatgctgagtctgtctacacggtggagactgtcctgtttctcctctatgctgagcctgtctacacggtggagactgtcctgtttctcctctgtgctgagtctgtctacacggtggagactgtcctgtttctcctctatgctgagcctgtctacatggtggagattgtcctgtttctcctctgtgctgagtctgtctacacggtggagactgtcctgtttctcctctatgctgagcctgtctacctggtggagactgtcctgtttctcctctatgctgagcctgtctacatggtggagactgtcctgtttctcctctgtgctgagtctgtctacacggtggagaccatattgtttctcctctatgctgagtctgtctacatgatggagactgtcctgtttctcctctatgctgagtctgtctacacggtggagactgtcctgtttctcctgtatgctgagcctgtctgcatggtggaaactgtcctgtttctcctctatgctgagtctgtctacatggtgtagaccatattgtttctcctctatgctgagcctgtctacatggtggagactgtcctgtttctcctatatgctgagtctgtctacatggtggagaccatattgtttctcctctatgctgagtctcctctatgctgagcagatttctcagccatcttcttgaaaacttgtctttataatcttggcttccacgaccctgcaacaag

SEQ ID NO: 1780 - protein, 737 aa, Homo sapiens
LVQTVLFLLYAESVYLVETVLFLLYAESVYLVDTVLFLLYAKSVNLVETVLFLLCAESVYLLETVLFLLYAESVYTVETVLFLLCAESVYLVETVLFLLYAEPVYTVETVLFLLYAESVYTVETVLFLLYAEPVYLVETVLFLLYAEPVYTVETVLFLLYAESVYTVETVLFLLYAESVYTVETVLFLLYAESVYLVETVLFLLYAESVYMVETTLFLLCAESVYLVETVLFLLYAEPVYTVETVLFLLYAESVYTVETVLFLLCTESVYLVETVLFLLYAEPVYTVETVLFLLYAESVYTVETVLFLLYAEPVYLVETVLFLLYAEPVYTVETVLFLLYAEPVYLVETVLFLLYAESVYLVETVLFLLYAESVYTVETVLFLLYAEPVYMVETVLFLLYAEPVYTVETVLFLLYAESVYLVETVLFLLCAEPVYMVETVLFLLYAEPVYTVETVLFLLCAESVYMVETVVFLLYAEPVYTVETVLFLLYAEPVCMVETVLFLLYAESVYLVETVLFLLYAEPVYMVETVLFLLCAESVYLVDTVLFLLYAQSVNLVETVLFLLYAESVYTVETVLFLLYAEPVYTVETVLFLLCAESVYTVETVLFLLYAEPVYMVEIVLFLLCAESVYTVETVLFLLYAEPVYLVETVLFLLYAEPVYMVETVLFLLCAESVYTVETILFLLYAESVYMMETVLFLLYAESVYTVETVLFLLYAEPVCMVETVLFLLYAESVYMV

SEQ ID NO: 1781 - DNA, 1366 bp, Homo sapiens
  source
  (1)..(1366)
  CDS (201)..(1166)
agtcattgtctctgactttcagccttggcccacgctccatccacctcatacctgtactggatctggaggttgtggtagtgcccagaatcacactggtcataggggtacttggagcatgtggagacatcaccaaggctgccagcccagtggctgtggggctgggatggggtggcctcagggctgtgagcttctctgtgggaatggtgggtttttctgtggggatggtgggtttttccgtggggatggtaagtttttccgtggggatggtgggtttttccgtggagatggtgggtttttctgtggggatggtgagtttttctggggagatggtgggtttttctgtggggatggtgagtttttctgtggagatggtagtctcttcagtggggatggtgggtttttccgtggggatggtgggtttttccgtggagatggtgggtttttctggggagatggtgggtttttctgtggggatggtgagtttttctgtggagatggtagtctcttcaatggggatggtgggtttttccgtggggatggtgagtttttccgtggggatggtgagtttttctggggagatggtgggtttttctgtggggatggtgggtttttctgtggagatggtgggtttttccatggggatggtgagtttttctgtagagatggtagtctcttcaacagaggtggtggtttcttcagtggggagagtgggtttttccatggggatgctgggtttttctgtggagatggtggtctcctcagtgggggtggtgggctcttctgtggagatggtgggtttttctgtggggatggtgggtttttccgtggggatggtgagtttttccgtggggatggtgagtttttctggggagatggtgggtttttctgtggggatggtgggtttttctgtggagatggtgggtttttctgtggggatggtgggtttttctgtgggggtggtgggtttttctggggagatggtggatttttctgtggggatggtgggtttttctgtggggatggtgggtttttctgggcagatggtgggtttttctgtggagatgatagtctcttccatggagatggtgggtttttccgtggggatgctgggtttttctgtagggatgctgggtttttctgtagggatgacaggctcttccatgtaggtggtggtctcctcagtgggggtggtgggctcttctgtggggacggtgggtttttctgtggaaatggtgggtttttctgagggaatggtgggtttttctgagggaatggtgggtttttctgtgaggatggtgggtttttctgagggaatggtgggtttttctgagggcatgttgggtttttctgaaggaatggtgggttt

SEQ ID NO: 1782 - protein, 321 aa, Homo sapiens
MVGFSVGMVGFSVGMVSFSVGMVGFSVEMVGFSVGMVSFSGEMVGFSVGMVSFSVEMVVSSVGMVGFSVGMVGFSVEMVGFSGEMVGFSVGMVSFSVEMVVSSMGMVGFSVGMVSFSVGMVSFSGEMVGFSVGMVGFSVEMVGFSMGMVSFSVEMVVSSTEVVVSSVGRVGFSMGMLGFSVEMVVSSVGVVGSSVEMVGFSVGMVGFSVGMVSFSVGMVSFSGEMVGFSVGMVGFSVEMVGFSVGMVGFSVGVVGFSGEMVDFSVGMVGFSVGMVGFSGQMVGFSVEMIVSSMEMVGFSVGMLGFSVGMLGFSVGMTGSSM

SEQ ID NO: 1783 - DNA, 1372 bp, Homo sapiens; identical to SEQ ID NO: 1733
  source
  (1)..(1372)
  CDS (201)..(1172)

SEQ ID NO: 1784 - protein, 323 aa, Homo sapiens; identical to SEQ ID NO: 1734

SEQ ID NO: 1785 - DNA, 1417 bp, Homo sapiens
  source
  (1)..(1417)
  CDS (201)..(1217)
cctgggcctcattattgaaccactaccaacatgttcaaaaatagagagaggattagaaaccaaatccttccaacatttgcatctctagatgtagagctaagaattctgaaataaacaaatgcagtgaatttggaaatgatacatcaattgcttcctcctatgacatcaatactgggagttatcaagagtctgcccatcaaatgctagggagatgttttcctccagacaccaaagagaagcaacagctcagaatgactaaactctgcgatcctgcagaaagtgaattgtcgccatttctcatcaccttaattttagcagttttacttgctgaatacctcattggtatcattgcaaatggtttcatcatggctatacatgcagctgaatgggttcaaaataaggcagtttccacaagtggcaggatcctggttttcctgagtgtatccagaatagctctccaaagcctcatgatgttagaaattaccatcagctcaacctccctaagtttttattctgaagacgctgtatattatgcattcaaaataagttttatattcttaaatttttgtagcctgtggtttgctgcctggctcagtttcttctactttgtgaagattgccaatttctcctacccccttttcctcaaactgaggtggagaattactggattgataccctggcttctgtggctgtccgtgtttatttccttcagtcacagcatgttctgcatcaacatctgcactgtgtattgtaacaattctttccctatccactcctccaactccactaagaaaacatacttgtctgagatcaatgtggtcggtctggcttttttctttaacctggggattgtgactcctctgatcatgttcatcctgacagccaccctgctgatcctctctctcaagagacacaccctacacatgggaagcaatgccacagggtccaacgaccccagcatggaggctcacatgggggccatcaaagctatcagctactttctcattctctacattttcaatgcagttgctctgtttatctacctgtccaacatgtttgacatcaacagtctgtggaataatttgtgccagatcatcatggctgcctaccctgccagccactcaattctactgattcaagataaccctgggctgagaagagcctggaagcggcttcagcttcgacttcatctttacccaaaagagtggactctgtgaccagcacccaagaagaccacaggacctggccttaccagctctgccattccctcacctagacctctcttttctctcttcttttcttctccaaccctcatctgacccttttcgcctgatgtggctttttatataggaaattgatcatttcttttttgcttcatgggtacaatcttagtggtactgtcatattctttacctga

SEQ ID NO: 1786 - protein, 338 aa, Homo sapiens
MLGRCFPPDTKEKQQLRMTKLCDPAESELSPFLITLILAVLLAEYLIGIIANGFIMAIHAAEWVQNKAVSTSGRILVFLSVSRIALQSLMMLEITISSTSLSFYSEDAVYYAFKISFIFLNFCSLWFAAWLSFFYFVKIANFSYPLFLKLRWRITGLIPWLLWLSVFISFSHSMFCINICTVYCNNSFPIHSSNSTKKTYLSEINVVGLAFFFNLGIVTPLIMFILTATLLILSLKRHTLHMGSNATGSNDPSMEAHMGAIKAISYFLILYIFNAVALFIYLSNMFDINSLWNNLCQIIMAAYPASHSILLIQDNPGLRRAWKRLQLRLHLYPKEWTL

SEQ ID NO: 1787 - DNA, 1261 bp, Homo sapiens
  source
  (1)..(1261)
  CDS (201)..(1061)
  modified_base (340)..(439): a, t, c, g, unknown or other
gcgctgaggctgctggaggcgcgggccgggcggtgcgcactgcggcgcatgccctgccccggcgccgtccgtgcccgcgggacctgacagccgggtcagaggtcagtgcgcgcggccagggcgactttcggcgtgcagagaggcgatgtgagcaggcctgccatccccaccccgcgcgaacaggtgggcgctcccgtgagatgcgtggcgtccagacctgctgcggcctcgtccgcactgcagacaccggctcgacgagcgcgcttctcggggctcgctgcagcacggtcgctagcaagcctggacggtccgcgtctcgtccacttactctcctggggcnnnnnnnnnnnnnnnnnnnnnnnnnnnnnnnnnnnnnnnnnnnnnnnnnnnnnnnnnnnnnnnnnnnnnnnnnnnnnnnnnnnnnnnnnnnnnnnnnnnntgcgctgctgtgtgctgctgtggctgggtgcctactgtgctctggcgtgcgctgctgtacgctgctgtgtggtgctgtgtgctgctgtgtactggtgtgcgctgctgtgcgctggcgtgcctgctttgtgctggtgtgtgctgctgtgcgctgctgtgctgctgtgcgctgctgtgtgctgctgtgctgctatgtgctggcgtgcgctgctgtgtgctggcgtgcgctgctgtgtgctggcgtgcgctgctgtgtgctgctgtgtgctggcgtgtgctgctgtgtgctggcgtgtgctgctgtgcgctggcgtgcgcctgctgtgtactgctgtgctgctgtgtgctgctgtgctgctatgtgctggcgtgcactgctgtgtgctggcgtgcgctgctgtgtgctggcgtgcgctgctgtgtgctgctgtgtgctggcgtgtgctgctgtgtgctggcgtgcgctgctgtgtgctggcgtgtgctgctgtgtgctgctgtgtgctggcgtgtgctgctgtgtgctggcgtgtgctgctgtgtgctgctgtgcgctgctgtgtgctgctgtgcgctgctgtgtgctgctgtgcgctggcgtgtgctgctgtgtgctggcgtgacaccggagggggagcgtgttttgtctgggatcctcatgtgacacctcagacactagatggtcctgcccagacagacgccggtccagggtcactgaggggcgtcaggagtatttccgtctggtcaggtgacatcagtgtcacatgggcattgctcacagaggggcccctggaggaaggagagtggcggtcagcactcgatg

SEQ ID NO: 1788 - protein, 286 aa, Homo sapiens
  MOD_RES (47)..(80): Variable amino acid
MRGVQTCCGLVRTADTGSTSALLGARCSTVASKPGRSASRPLTLLGXXXXXXXXXXXXXXXXXXXXXXXXXXXXXXXXXXALLCAAVAGCLLCSGVRCCTLLCGAVCCCVLVCAAVRWRACFVLVCAAVRCCAAVRCCVLLCCYVLACAAVCWRALLCAGVRCCVLLCAGVCCCVLACAAVRWRAPAVYCCAAVCCCAAMCWRALLCAGVRCCVLACAAVCCCVLACAAVCWRALLCAGVCCCVLLCAGVCCCVLACAAVCCCALLCAAVRCCVLLCAGVCCCVLA

SEQ ID NO: 1789 - DNA, 108316 bp, Homo sapiens
  source
  (1)..(108316)
  CDS (201)..(320)
  CDS (6586)..(6893)
  CDS (11403)..(11625)
  CDS (35649)..(35883)
  CDS (38436)..(38569)
  CDS (49760)..(49948)
  CDS (56862)..(57074)
  CDS (60383)..(60533)
  CDS (62136)..(62275)
  CDS (75449)..(75567)
  CDS (76611)..(76827)
  CDS (93827)..(93944)
  CDS (99913)..(100084)
  CDS (107990)..(108116)
ccaagtgttagatcttatgtgcagttccctttttccatgggttttagcagcccttcggaactgctatgcacattttaaagggtgcctattcctcaaggaaactgagtgtgtgaggaacaacctgggcttctgctggagggctttctggatcccagcaggcagcagcgtggttgccatgtgtgcttgagttttacactcacatgggccctggagcccagtacacccagccagcccctcaaacacttgccattgcactccctgctgccattctgagtcaggcaggggtggaattggctgtggactgtgggcaggggagggaagtgagctcagggatccccagagcacgtccaggacaaagcactggggtatatgtgtatgtgtgcatgtgcagtgtgggtttgttagaggggtttactggaagggggcttctggctgccccaggacttggataagagtcctgaattccccacccctgccacgcccagctctcacataggttagctctgtttggatgggaacagcacctttgtgccgtgcatatgatgtgcctgggacccggcctggcatcactcacctccagctgcatctcccaggcagagtctcgacctcctgctcatcctaggggtgcagcctggagctgttagaggctgtgttagtatttggtcaagtctttacatgtgaggggaagagactggatgaaatcatttatgctgagagtctgtagtttttataagccaaggttaaggtctagtcaagaagagggctcaaaaaaacgcctggctagagtttggtcaaggaaggtgtgtgtgtgtgtgtgtgtgtgtgtgtgtgtgtgtgtccatccagggaggaagaggcaacttgacttggaagaccaatctcagtaaaccaaaatccaactgggagtggggggccggggaggatgaggggaagcaagggcaggcccaggtttatggggccttaaatgtagacaattaaggggaggttgcctttagaaaaaaaaaaaggatagaaaaattaggaatacagtgttagactcagggactcggaggggcccattcaagtaaggaggcctggagtgtaagcttctcttggttcacagcagatcttcctctggggaagggtacgtacgttccaggccatgtgaacagcaaaaatgaaggccaggaggatagagtgtttagggaatgggaatcatttcaaaccctgtttgcatgaaggatatgcaagagataaagctagagaaatgtctggagatccaattacagagctcttttggctcaccctgagtaaaaatcctgttccctcagctgtgcagagccacagaaggattttggaagggggtgatttgatcacttatttatgtattagacagatcactctggaagaagtgaggaggaggggctggagccaggtaaggctggaagtaggtggcaggcagagggtgtatacaaggcactcctaccacatggcaaggaagatcccctatagatgacttcaaaatggatgctggagttcagacagagcagtttcttcatcagaaacatctagattaatatttctccaagtttaaaaatatgcttctatatatttttgtggaaatgaggcctcccatagactgaacatttgtgtccccctaaaattgatgttgaatcctagtgcccaaggtgatggcatttggaggtggggcctttaggaggtgattaggtcataagggtggagccctcacgattgggattagtgcccttgtaaaaggggctccagagatctcctttgccctctttccaccacatgaggatgcaatgagaggatggctgtccatgaaccaagaagtggaccctccccagaaaccagccatgctggcaccctgatctcagacttccagcctccagaggaataaatatctgttgtttagaagctccccagtctatgataatttgttatagcggtccaaactgactaagacaaggcccaagctatcctaagacttgtttttgattaattttttgttttgctttgtttcattttagagacaatgtcttgctgtgtcacccaggctagagtgcagtggctattcacaggcacgatcattgggcattacaccctcaaagcaattaattactgggcccgagtcatcctccctcctcagattccacagcagctgggactacagatgtggaccaccaggtccagctgattaatcttacatgctgtaacatttatttgttaataaaaaattgtatatttgttttgtttgcattaggtgtcatgcatataaaaaggaatatatttgaaatggagttttgctcttgttgcctaggctggagtgcaatggctcaccgcaacctctgcctcccaggttcaagcgattctcctgtctcagcctcccaagtagctggaattacaatcatgtgccaccatgccagctaattttgtgtttttagtagagacagtgtttctccatgttggtcaggctggtctcgaactcccgacctcaggtgatccacccacctcagacacccgaagtgctgggattacaggcattagccactgcacctggccaggaatagatttttaaatgatgatttttatttaatttaattaacttatttgtttgagacagagtgtcgttctgtcacccaggctggagtgcagtggcccgatctcggctcactgcaacctctgcctcccaggttcaagcaattcttctgccccagtcccccaagtagctgggattacaggcacccaccatcacacccggctaattttttgtatttttagtagagacaaggtttcactgtgttggccacgctggtctcaaactcctgacctcaggtgatctgcccgccttggcctcccaaagtgctgggattacaggcgtgagccaccatgcccggccactaaatgatgatttttaaagtcagataattatgccacaccttaatatttaatactttatttctacatatgacattttgatacagacatgccccatataatatggactctgtgttacataaactgtagctgtgttgaggacagtgtccactgctagaggcaaagttttaaaatgaaaagtccaaaagttaggtaagttctgttgctttaagttaggaagttattagatccctggaagttgatgcctgctttccctttcagattttcttttctttatttttttctttttgaggcaaggtctcactctgtcacccaggctggagtgcagtggcaagatcatagctcactgcagcctcaacctcctgggctcaaatgatcttcccacctcagcctcccgagtagctgggaccacaggcatgcgccaccagtcccaaataatttttttgtatttttttgtagaggtggggtttcgccatgttgcccaggctggtctcaaattcctgggctcaagcaatcctcctgtcttggcctcccgaagtgctggaattacaggagtgagccaccacatccagcccagattatcttttttaacttattgacagataaagatctggtctgctgtaatcaaaaaattttctgttgagaataaatctgagaggtagcatctgggaagtagaaccatcaaactatagaaccattttctttgcagtctcaaggaaaagagtggttgtattgattcgttctctccttcctcttgtgcagatgaaagaaaagcaattgacaaaatgcctacattttaatgtgagatggcagactgcacatacttcagttcaaagtagtctaagcatctacggggttccccagactggagggcatctcagacaccaactggtgccctgacccttcacttattaaagcagaaaaaaaaaaaaatcctaccacaaggtttaaagacacaagagccatgcggctcaggttgaaagaacaacgggcctcatgcctaccccgattccatgaagcgactgaaatggttccatgaacttttgcaactcagcttgaaactgctgatttggtccaattcttctattttccacgtgtaaaattggtgctcagtgagataaagtgacttatttctgttcacattggccagaaataaatcttaatttccctttttaaaaaaagatagtactctcactgctacgtcacacactgttatattttttaaatgtttgcagatgttaaatcaaagcatgcaccttaatgaatcttttcatctcttgggaaataaaccgtcacatattgtggaaacgcttcctttgaatttctgaaaacatggaacacatactcatattgtatatccacaaaatgcaccaggaattatgcagacgctttttttttttttttttccagacagggtctcactttgttgcccaggctggagtgcagtggcacaaacatggctcactgcagctttgaactctctagctcaagtgatccgcctccctcagcctcctgagtagctgggactatcagtgtgcaccaccacgcctggctaatcttttttttttttttgtagagacagggtctcattatgttgctcaggctcagactcttttatgtatgtgatcatttaacacttaggaacaagaaatccatcccgttgcactgattcaacatctgagattcagaaattatctgctgttttggaagactacaagatgaaccaggcaatctcttcagtttctgttgtcagggaactttacttagattttctgaaagagccactgagcagttttgagtcatttgcctcttcaagagattgttcctatttcagaggtctttcatttttcctttttgtattttgactagagtttatctgatctaaatacatgttttctcacagaaggcacaaaatgcttcataaggagtcattttgtcctttctttcttctgatgaacctgccctctcctcctctgcaaggtttcacagtgatgtgcaacgtccactctccatgctaagtgacagtgactgtaatttgctgagagagcagtgaccaaaccattggctccttcagaggctggttatttcaaccatctggagaaaaatggaggctcctaatgcagagtgaggaccttaagttgtctagggcaaagactcatttgttcattcattcattaattcacccatgcactcattggacaaacttgaatagggtactatgccccaggggtgtgaggaaggataaactatggagtggcccattcacaacaactgcacatcagggcagagcagaagtgctctaacagcaccagctccaggtcacccaaggatgaccaggaaggctccaggcagatcaagcattcgagctgggcttggaggaatatccttgattctggaggtggagttgggaagcagccatcccagcaaagaacatggcagcagagaagctgaagacaccaggatgaggagtggaccagtcggaatccttactcctggatgtgctgggggacagatggactcctccaaagagctgaatgctgggctgaacagttttagtccttaggagctactgactgttgtcaacagaaggtgacagcgcctaccctggcagctgcccatggggagtgatgagccggggaggaagatcctcaagacagtgaggacagaatgcaatatccctggcgtgttctaggggaaggcagtgaaggctaaaacttgggcaccggcagggagaataggtgggacaggagagccgtggaagacaggatgaagccagaaggagagctggagaaggacctgaggtgggggtgaagatggtgggagtgtcaaggggattctcacatttttatttttaactttaaaaagtttttaaacagaaacaaggtcttgccatcttgcccaggctggtctcgaattcctgggctaaagtgatcctcctgtctcagtctctcaaagtgctgggattacaggcatgagccaccatgcccacctgatcctcacattcttttttttttttttttttctgatacagagtcttgctctgccgcccaggctggagtgcagtggcatgatcttggctcactgcaacctccgcctccgaggttcaagagattctcctgcctcggcctcccaagtagctgggattacaggtgtgcaccaccacacctggctaatttttgtatttttagtagagacagggtttcaccatgttggccaggctgatctggaactcctgaccttgagtgatctgcccacctctgcctcccaaagtgctgggattacaggcatgagccaccatacctgactgattctcagattctgaaatgacagttaagcccaggactcaagccagggacagaagcagataacctggttttggtgagaaggttatgcacttgcttctgaaaatgttgatgatgagactaagtcttatagtttcttgtgcacctcccttggtgcctagaagaaaggttaaaacaggatacattacagagggactatcttgagagaggagttacctgggcacagcccaggggcccttgggagtgacatgcaagggcagcactggcttgccttatttggttctcccgctctttcttctttcccttgtaaaagtaactgaagcttaaaggtgaaaatgacttaaataatagaaaccatgttagccttactccccttccccattagccacaaattggtggcgatcaccattttgtgcaccgagcctgggtctcacgcttgcaagtccttgggctcatctggagtcagcttcatcagtttgtccacacagagcaggatgagggtgaggaaccagaggctccagccaacagctgccgcgatccagccgtactcgtccactcctgtgcggcagcaccgggctgcttgtgggcagaagtccacgtctggtggggaagggacagcaaggacgacggcatgcaccaccagccctgcccaggcttctctaccattaatattaacagaacaatcacagcacggtagctgacactgatgaggcctactacgtgccatgcactgtgctgcgtgcttttacacgttagcttatgccttcctcacaaagcgacaggtgcgacttttattcccattttacatgaagaaactgaggctgtaatttgcccaagatcacaagatggcagaagaactcaaacgcaagtctgcaggactctgaagccatactcttaacctctatgtattattccctaataccccttccttttttttttttttctttttgagacagagtctcactctgttgcccaggctggagtgcaatggcatgatctcagctcactgcaacttctgccttctgggttcaagcaattctcctgcctcagcctcccaagtagctgggattacaggcacgcaccaccacacccagctaatgttttgtatttttagtagagactgggttttgccatgttggccaggctggtcttgaactcctggcctcaagtgatccacccacctgggcctcccaaagtgctggtattacaggcatgagccaccacgcccagcctatccttcgttttaagtgcctaagttaatgcattcggtcattcaatgagggcaggataaagggaaccagacaaaataaagtggaactttctcttttttttttgagagggagtctcactgtgttgcccaggctggagtgcagtggtgcaatttcggctcacagcaacctctgcctcccaggttcaagcaattctcctgtctcagcctccctagtagctggcactacaggcgcatgccaccacatccagctaatttttttctatttttaatagagacagggtttcaccatattggtcaggctggtctcaaactcctgaccttaggtgatccacctgcttcatcttccgaaaatgctgggattacaggcatgagccactgcgcccagctgcaaaactttctattagctagacatgcataatagtggttgctctatgaattactgagcgccttgtggctagaagtaggcaagaagaggaaaaacgtgcatagaagaagaagaaatatgtatgccaaggacgccaaaaccaagctgttgcattgggtggaagttggactagatgatttcttatggcctttccacctccaaacttcttcaagcatttgaacctagggcattgttagctgctgacctgggatgggtcattaaagcaatctgtgtcaaagattgtgcacctagatggggatcagagccaagaaagcctttcagacctgctctgcaaatagttctgggacaaaccacactggtgcacaggaaggccaggcaggcccttgcccacttgacaccaatcaacggaaagcggggaggcctttgtttccctcccaggctgagggccagttctggggttagagcagttggcaggagaagcttactgaggcactgctccagggtcccagggtctgggtggtgagcggtcaagcttgagctgttgctgctgcttgcttctggaagaaaagataggagatagtctgaggcactggcaaaagctattcccaggcatagattttgaaatgttttttgtaaatcagtagtgagtattatgaaagtattatagaagctcccgcatgggcatattgaggctttctgcaacaaagctaactccctgttatggaccgaattatgttcccctctcccaagtttcatatattgaagtcctaaccccaatgtgattgtatttggagatgggacattcgaagaggcagttaagcttaaatgaggtcctatgggtgggccctaatccaatatggcggggtccttataagatgaggaagaggccaggtgcagtggttcacacctgtaatcccagcattttgggaggccgaggtgggcagatcacctgaggtcaggagttcaagaacagcctggccaacatgatgaaaccctgtctctactaaaaatacaaaagcagccgggcgtggtggtgcatgcctgtaatcccagctacttgggaggctggggcagcagaattgcttgaacccaggaggcggaggttcagtgagctgagatcacaccattgcactccagcctgggtgacgagtgaaactccgtctaaaaaaaaaaaaaaaagaagaagaagaagaagaagaagaagaaacatcagcaacacacatgcacagagaaaagtccacgtgagaacccagtgagaaggcgtctatttgcaacccaaggagggaggcctcaggagaaatcaaaccatcaacaccttgatcttggacttccagcctccagaatgatggctgtcaaaaaaaattaaacatcatagaagcaagcccagagactgccagaatacgcagcacatagattgattcatgagcaaggagtggaaagataaaaaggactttagcatgaattgttaaagtcctgttgtcttgaggtgtgggattgggttagggatctgaggcatccaggttcctgtccataactgacaataagaagagagatgacctctaagtccatactgttcaatacggcagccactagccacctgtggttgtttaaatttattaaaatcaaattcagtaaaaaaaactcagcttcttgtttacattagacccatgccaagggttccattgccgcgtgtgactagtggctaccatattggaagcaccactcagacatgggacatttccaccctcagtgcaagttctattattagacagtgctcatgctgacctaggtagatggaaaccaagagatggattggaagaaccttcctagaaattatattgctgttcgttctgcttcttggggaatgcaaaaaggaaaaaaaaaaaagtggtgggcatggaaactctcaaggttcccctggctgtgggtcagtgtgtccttcaagggagcttgttgtcacagcaggacgagttcagaagaaacctgctgtttagctaaagccatgaagttgctgctgagactaattttatgccacccaacccccaagccactccaatgtcctgcttaaagtatagtaattgcctcgatgcaatctgttactgtaaattatttacagctaaatggcttagagcctggtctttatttgttttggagaaactgattcctcactattctaattttccttatgactcaaataacttccttggccctgactttcatttcacctctacacctagaatggaagttgtcctcttccaaagtgagtggaaaaaaaccctagttggctgaatgctagggttaggttcgagcttatgaaattgccattgttataggtgaaaattgttcaatatcagcaattttctgtggttcaaatggaatagccccggtgaaaattcctaagaatttaaacatcgccctcctcccttataagcagagccagaagcgagggagggactggccctacttggggctattccacaagaaaagctgctgggaagacccaacgattcagtgcagttaaacttgtcttctgattctgagctcccatcataagcaaggcactgtcggggtaagtagaaagaaactcagcactcttatttggggaggggtgaagttggaaaataaaatgaatgtgcttaccataattgctgacattcactgtgtgtgttctatgggctatttctaagttctttacatgaaattacatcaattcgtcttgacaagcactatgattgtccccatgagataaaggaggaaacttggcatagagaggtaaagtcatttgctcgaggtcgcatagctagtgagtcatggaagctggacctgggttcaggctcagcggctcaagagtgcacgtcttgaacctcaacaccaacacccctggcagtggctacagaagagagtctgaggatgagaggggcagacacaggactttgggggcagggttggttttgggagcaggagtgttgcagggcatagagagtgtggtggtgttctgaggtggctgagaacaagatcaaagccaggagcagaagatggtaaccaaggtccctctgccgtgagttgcagaacccggcctggcagggcaaggcaggggatgtagatcagccttccagcctccacaggaaaatggggagataacccagcatttccagtgcccggggaggcaggagggtgggagacagtgaatggcagccctcctggcagtcaggttttgtgaaagtcgcagagaaagtacaaggggcagggagggatggaggacttaggaaagggaaggtcagacacaaatgtgcacagggaggattgcaaagcacgacagcccagtggggctgagaaggagccttcaggacacagcggaccaagagatatcattttggtcccctgatgggtgagactccagcaaataactttttcctttctttgtggcaaaggccaagagaggtggctgctcctgccttagctgaggaattgagtatctgatctccgtctcaggccaacctaagaccccccctgccccagccccacctcccaccccctgcctaatccttcagatgagaaagttctgtttcctccttcctttgcgcaggaccaaccctggccaaagaatcttccccctcctccttctttccctcccacctctcttccctccttccctcccccttcccagcctggccatgaataaagctcataacgctacctgccgagcaagccgagtggagggaggcaaaggccaggctgaggatcagggtggcccgggtggcagcggggaggcgctgcatgctggaggctgtgctgagtgcccggtgcaggtgagccggtcctgcggagttgtgccgagtgcctgctgcaggtgagtcgactcccacctgcaggagctggaaagcaactctgccagaggtgaacttatgctgggtgtttgggggaaacaccatggggtggagcaaaggaaacttggcctgtcacaccttctctcacctctctagaagggaagccaaaccgttggctgaggaaggaagggaggggcaagctgtgcccttctcccctgagcgcaaatattgtccttattgagaaacaaggggaggacaagagagatctgtgtcatgctggttcctgggacatgagtttgctgcctctcccatctgcaggtgtagcatggatgctcaattccatttgggccaatattcactgagcacccactatgctgaagttgggagatacctgctgtcgaagtgcgttaattacaaacacgcatcattcaaccccagaaccgtgtttgaggaatggcttgggaggataaagcactgtgggtttcaacagtggaggccacatctgctgatgggatgcttcaagaagaaaatggcatttgaggttgggcatgggggctcaccctgtagtcccagcactctgggaggctgaggcaggtggatcacttgaagtcaggagttcaagaccagcctggccaaaatggtgaaaccccatctctaataaaaatacaaaaattagccaggtgtggtggtgcatgcctgtagtcccagccacttgggaagctgaggcaggaaaatcgcttgaacccggaagacagaggttgcagtaagctgagatgctcctgaccctgcattccagcttggccgacagagggagactccatctccaaaaaaaaaaaaaaaaaaaaaaagaaaatggcatttggcctgggccttgaaggatggctagaattttgacagggggagaggggaagatggcattataggtagagggacagatgagcaaaggtccagaggtaaggaagtgtcagagggtggctgtaccagcagcacccagaagcgcaggtgagccaaggcatgtgaggtggggaggcaagaggagagctgtgggctaagcttctgcgtgcctggtagaggaatttgaaacaaagtcaggaagcaaaggggaaggttctgtagagattttgagctgaggagtaacttgactagagctctgcattccgtctaaaacatttattgaagacccacatgtatataaaaggtctcatcctaggcactggagactgagatgactgagacacgcctcttccccttgagagcacagtgcagcagggaaccaaacccggaagaaagaaatttgatgcaacctggcaagactcaaataggggtaccttccactgtgatgggaataaaaaggaggatgggatgaactctgcctgagaggtataggggaaggattcacagagaaagtgacatttgggctgggtgctgaagtttgtatgtgcagattagagttgatgggcttttcaagtcaaaggaatagcacctataaaggcgagggaatcgtctgtgtgcacacagcctgccatgtgtggaagtgttcctgcgcatgaatgggcctggtaagggtgaggggtggactccagctctgtggaaagacatagaaggcgtgagtaagccccaaggaaagatttcctagtggagtgtaacagcccaggggaggcacttttttctaattggctctaagatataaaatagtggtggcctatgttcctggatttggggatagggccaacgtgccctaggaagggtgattttcagtcagtgcacagaagtccagtttaggcattaccactagttgaacattaaacagttgcatgccaggccaggctctcggtgtggggacctgggggtgagaaagaccacacagcccttgtgctcaaggaactcaaggtccccacagagaggacgctgcttagtagaacaaatgctgtcctcgatgttttcctcacaagtaaaccctgcagtgggcttcacagggcaggactgatttatccaatgggtactagggataacagcggtacgtggaatccccaagatttccaaggatctcaaaaatgtttgagacctgagaaaatattctcagatccaaaatttgaagaacagaccaggcatattggcacacgcctgtcatcccaacactttgggaggccgaggtgggaagatcacttgagccagggagttcaagaccagcctgcacaacatagtaagaccctgcctccgcaaaacaaacaaaaaaaaacacaaaaaaattacttgggtatggtagtgtgcacctgtagtctcagctactcaggaggctgaggtgggaggatcacttgagcccaggaggttgaggctgcagtgagctgagatggcaccactgcactccagcctgggtgacacagtgagaccctgtccccaaacaaacaaacaaaaatttgaacaatcaaaaactgggcaaaataaatgattgtttcaaaagcaaagttatacagttcacttgaaatgtttaaacggaaacgatttaatgtgggacgctgggtgcattttaatgtgtttgacgtgagcagagcctgtccctcctatggaatcggaacctgaggtatgcaaacatgtaagatggcctgcctggggttattgtagtggtggattgaacagcatctgcagcctaagctgagaccatcctatcaagtcgtatcagggaaagcttttctggcaagcagtggatgtggaggagggggataatgtgttggccctccctccctattttatcattgttatgtgatgtcggactgttttagatgagctgtttgtaggacaaacattctcctatctacagatggaagaactttgttattcgaaaatagtataggctgggccaggcacggtggctcaggcctgtaatcccagcactttgggaaactgaggcaggtggctcatttgaggtcaggagttcgagaccagcctggctaacatggtgaaatcccatctctactaaaaaaattcagaaatattagccaggcgtggtggtgcatgcctgtaatcccggctacttgggaggctgaggcaggagaatcacttgaactggggaggtggaggttatagtgaaccgtgattgtgccactgcactccagcctgggcaacagagtgagactctgtctcaaaaaaaaaaaaaaaaaatagggtgggctggactggccaatgataactattaaccccaaagaaagggctgtgtgtgtgtggccactttttactttacgagtgtcaccagtatttgctgtttgtagcaggtctacaactaacaactccatgtggcccatttcctcactcatacattttgcatcaggtttactttggagcgcatatcaggaagttgccttactcaaagctagactttctcaagactttttttttttttaaatgggtgagataggtatttggttacacacactattttaaaagttcaggctgaaatgtctgtggctaggcaccatggtggtggttggagagaggagtagccaagagagtgggattccagggctcttactgcttccaatttcacctgttatccctgataagatttcatgtgaaaaagaaaagaagtaggcagagagtttccagggctaaaagatggaaaacctgcagtctgtggcctggaacggcccagggaagaatatttcatgttaatgaagcttctcttgtgattctgataggccccgttgccacctgtccatctcggggaaaagacctctcaccttgaacttgggtttttcatctccagttaacccaaaatctattcagaggagaattgtggccctaaccaagcctgtgcctgccaagccccagctccctcacagagatggggttgatggctcttcttgctcctggctctgtcaggatctgtttttacaaaataatgtcaggctctgggtggttgtgggaccgaaacatctagatgtggacctgagcagcacttagtttgtggaggagttaacctcactccctgcccttcagtgatgggtctgtaatttggagagaacaagaggttcccttttaggaaaccttgagaactacagctgttaagatcatgccatagagttagttgatcaaagtaagaaagtcagcaaggaagtcctggagtccaccatttggaataatttttgaacacttcccaggatgactaatttagcttgttcaaaattgcactgggaggcggtgcagctatggtccagacacgcggaggttaacacaaaggaggtccttcctcttggcgaaaacaaccttccacctaggtcctgtatcttattccctcccatcttctctgaagtatatttcttaatttccaaacatacggaggttttctagttatctttttgttattgatttgtagcttagttgcactgtgacctgcgaatatactttgatgatttctattttttgatgttagttaaaagacaccatatgaccaatttttgtggctcttgaatgtgtcatgcagttgtggggtcagtgctccgggtaagtccattagatcaagagtgctaattgtgtggttcagaacatccatatttttcctgtcttttaaaatttggtctaattattctgttgaatacagagatgattgcgggtttctttcttccctgtagttttgtcaacttttgcattcaatatttgaggctgtaattgaggtacaaacaaatacggaattttgacaacttcctggcaaattgaaccttcttttaaaaaatcattgtgtaatatccctcatctcttttatatttttgagatggagtctctctctgtcgcccaggctggaatgcagtggcacgatctcggctcactgcaacttccacctcccgggtccaagcgattcttcttcctcagtctcctgagtagctgggattacaggcgtgtgccaccacccccgggtaatttttgtatttttggtagaaacaggggtttcaccatgttggccaggctggtcttgaaatcctgacctcaggtgagactcccgtctcagcctcccaaagtgctgggattacaggtgtgagccactgcgcccagccttctttatctctagtaatgtttttttgccataaactttactttgtctgatattgctgtagctataacaggtttcttttgttttgtttggcatgctaaatcattttcccatcatattactttcaacttttctaaaaccctgttcaagatgggaggatttcttgagcccaggactgtgagaccagcctgggcaacatagtgaaactctgttgctacaaaaaaaaaaacaaaacaacaaaaaaaaaaacaaacctgagtttggtgatgcaagcctgtggtcccagctactcaggaggctgagataggaggattgcttgagcccaggagatccgagatggcagggagccatgatggagtcactacactccagactgggtgacagagtgagaccctgtctctaaaatttaaaaacaaacaaatcaatctatcagcttaccaagtgctctctactcttcccatctagcttatgttccttttctctttcttctcactacttttggattgagttgttgggttattccattttgtagagattacgacatgcattccttttttgttgctttttaagattattttattctgcaacccaggagcatagatccaagttaccctgaatatatgttctcacaagtgcattcttaacatatcaaagtctaatattaattgacactttcaccactttcatagataatatgaagacctcagaactttaactccatttacccactcgcccaggctggagtgcagtggcgctatctcggctcactgcaagctgcctcctgggttcacgccattctcctgcctcagcctcccgagtagctgggactacaggtgcccgccaccacgcccagctaagtttttgtatttttagtagagatggggtttcaccgtgttagccaggatggtctcgatctcctgacctcgtgatctgcccacctcggcctcccaaagtgctgggattacaggcgtgagccaccacacctggcctatccactcctgatttttataccattgtagtcatgtatgttagttatacacatagtttttaactcaataagtcattattattattattttccaagtgaatatatgagtgaaatttattaaatttatttacatgtttaccggtttattgttcttaatttatttctgcatgtctggtcttccatctgtgatcattttccttctctttgaagaataccatttagtattccctcagtggagtgattaacatgttactttgtttgtctggatatgtttttattcttccttcattcttggaaatcaccttcattgggtacaaaatgtaaggttggcagatattttctttcagtgctttaaagataacatttcatttcttttggctaccattgtttctgttgagaactgtccacctcactggggcttcattgcagataatttgcctcttttattttttggctgtttttaaatttttctttgcctttggttttcagcagttttactctgatgtgctgaagtatggattccttttttgtcctctttggagtttgtaggcaattggatatggagcttgatgttattaataagttttgaaaacttctcagccatcaaatactacttgtgaaccattctctcctctctttttgtgactgattacacataggttagatctttccactccatcctgtaattctcttaccttcttctttattctttatctttttgttttcctgtgttttactctggatattgccttttgcccagtcttttatgaaatctcttgtcatctgtgtctaatcctcttttataactacccattgggttcttaatttcgattatcttagttttagttccagaatttccattctgttcttttttatatttttttttctgccaaactattcagtcctgtttttcatcttcataaacagaggggatataattcctttaaaatccgtgtctgataacctcagtcttcgccattcttttcccattcgtttatttccattgtctattatttctgctgttttcattcatatgatcatgtttctttgcatacctggttattttttattgtgggcaaaattgcaattacatactattgtttatagaaataacttgagacccaggataatgctttcttcctgtagacatgatttttgttgttgttgctttaatcgagtgcttgggggcaacacaaatctgctatcatgtcattccggtctcaggaattgagacgatgtgtgtcagtttattttggatacctttccttctatggtgtagccctttagaaatttcatccccaaggaaataaccaaagatgagcacaaaaatgcatatccaaagttctccatctcaatattacaatgtttgtaaaagtgaaagcttggaagcagtttataatgaaataaagggtagctattaaaaccgtttttgggactgggtatggtggctcacacctaaaatcccagcattttggaaggccaaggtgggctgatcacctgaggtcaggagtttgagaccagcctggccaacatggcaaaaccccatctctactaaaaatacaaaaattagccagtcctggtggtatgtgcctgtaatcccagctactcaggagactggaggcaagagaatcgcttgaacccaagaggcagaggttgcagtgagccaagatcatgccactactctccagcctgggttacagagcaagactctatctcaaaaaaacaacagcaacagcagcaacaaaaaacattcttgggtaccatttaatcacttgggaaaacatttgccatagtatacaaaacagaaaagcaggatataaatctttatgtcaatataattccagttttgtaatatatacacatatacaatgaaaaatgtttggaatgaatcctctcaaaatgttagtagtagtcatatctaggatgtacagttttgggtggttttaattttgtttttaatacttttttgtgtttccattttaaaataatgaatgtgtatattatttttatgatcaagaaataaaatcaagttaatacttttttttttttttttttttttgagacagagtcttgctctgtcacccaggctggagtgcagttgtgcaatctaggctcactgcaacatctgcctcccgggttcaagtgattctagtgtctcagcctcccgagtagctgggattacaggcatgtaccaccatgcccagctaattttgtatttttagtagagacagagttctccatgttggtcaggctggtctcaaactcccaacctcaggtgatccacctgcctcagcctctcaaagtgctgggattacaggcgtgagccactgcacctggcctaagttaatacattcttaaagattatttcacaggaaagcaatacagtcacaatgaagcagacagattttacatatctgtcccattacctgggaaaaatgttcaatatcagggaatcttcttttccattaaaaaaacaagctggccaggcatggtggctcacgcctgtaatcctagcactttgggaggctgaggtgggtggatcacttgaggtcaggagttcaagaccagcctggccaatatggtaaaaccccatctctactaaaaatacaaaaactaggcaggcgtgatggtgggcacctgtaatcccagctactcgggagggtgaggcagaagaattgcttgaacccaggaggcagagtttgcagtgagccgagattgcaccactgcactccagcctgggcaacagagcgagactctgtctcaaaaagaaaaaaagacaaaaacaacaacaacaacaaaaaaaaaccccccaaaaaaccttaacctttaagtttcacatggtgcagattactgcctatcatagcctcagctcttggagtgctcgtggtcacaatggaatgtacagacatatccacggatggtcaggacacaaagaagactagaaagaagacacagatataacatcggattacaattagaatctcagtgttggaaaaggacctcagagaccatccgggccaatctttaaccttggaagaatgccctctgaattaatctgttctcacgctgctaataaagacatatccaaggctgggtaatttgtaaagaaaagaggtttactgaactcacagttccacatggctggggaggactcacaatcatggcagaaggcaaaggagaagcaaaggcacatcttacatggtggcaggcaagaaagcgtgtgaaggggaactcccatttataaaaccatcagatcttgtgagactcatttcctatcatgagaacagcacaggaaagacctgcccccatgattcaattacctcccactgagtccctcccacaacaagtgggaattatgggagctacagttcaagatgagatttgggtggggacacagccaaaccatatgactttcctataaggaaagtaggatattatagagtttggtatagctgcatttgacctgtcctgcttcttaaggttgttagttggacttctgcttaaatgcctcaagggattggtttcttactaatttttaagacagccagctcttctgtgggttagctcgggtagaaaagtttgtgagttactgtcatcaaacaagtaagggcattttaaggtgaagttaataaacagttggaaggagggcttttcagctctcaactctatgattggcaatttctggttccctacaattactcttatcatttgtgcaaaatatttctgttggcacaacaatctgagcatgtggtcagattcatcttttgtttaataaacagagagatttgttctcaaagagtaactttaagctaaagtttttggaaataagctgcaggtttgtaataaatattccgccaatttttcttctccagttttgttcacataaaaccgaagcgaaccagatagtcaagtcaatgattgtttggacctgtcttcccaacatccaaagacccctctctcactgtgttttctggccttttctataacttcccttcattctctttctctttttttctttttccgtttttaagacagaatctcactctattgcccagggtggagtgcagtggtgcaatcacaactcactgtagcctccacctcctagggctcaagccatcctcctgcctcagcctcctgagtagctgggactacaggcatgtaccaccacacccagctaatattttttatttttagtagagttgaggtcttgctctgttaccgaggctagtctcaaactcctgggctcaagcgatccttccgcctcagtctctggaaatgctgggattacaggtgtgagtcactgctcctggcctcttttttcttttttgaaaatgctttgtccatatgtttcattttatttatgtatttatttagagacagggtgttgcctaggttggagtacagtggctattcgcaggtgcaatcacagtgtattacagcctcgaactcctgggctccagtgatcctcccacctcagcctccttagtagctcgggctacaggtatgcaccaccatgcctagctcctcatcttctcttgtccaagctgcctctaggtttgttggttgggaacacaagaatcctgagtcaagagtcctggattccagttttcatgttgtcacttggagtgtgaccttggaggagtcatgtaaccttggtgtcgatgcgactttctagaaggggaacacgaggggaaaaatctgggggaattatgccttccatcctttgtggggagaattttctctggggtccgcaggactctgcagaggggatacgtgatgcccagaaagggttttgctatgtatacttcctaacacaaaggggtgttaagtcctgtgagaaacaactggaaagctaccgtgatggcatgaaaagaccctgaagtgcagagccctgggttctgcttccagctctgccgccaattacctgcaggaccttgagcaaattgcatctgctccctggagttctgttttctcatctctaaagtaaggagactgaatcaggtgatctcgaagtttcttccagtgatagatttctatgactctgtagtcaatgcaggatattaaatggagaaagaagagaaacaagatagtacatttaaattctttttttttcttttttagaaagtggaggtggaaatcatgataagaaacttacttgtgtaattgggagtaaatattattatagaaaaggcagataactagggaggtgctcccaagtgaaaaacttaggctagcgccgggtgtggtggctcatgcctgtaatcccagcattttgggaggctgaggtgggagggctgcttgagcccaggactttgagaccagcctgggcaacatagggagaatctctctctctcaatctgtctctctctctctccttaggctataggtaaaaaaatccatccatgataaacttcagggcattctgttgtctctcttttttttttttcctgagacaaggtctcactctgtcacccaggctggagtgcagtggtgcaatcttcgttcactgcagcgtcgacctccctggctcaagcgatcctcccacctcagcctcctgagtagctgggactagagatgcatgccacgaaggccagctaagtttattttgtgtagagacagaggcttgctatgttgcccaggatggtttcagactcctgggctcaagcaatcctcccacctcggcctcccacagtgttgggattataggcatgagccattgtgcccagcccattctgttctctttatgataaaacttcattttcctaagtctcatttccagttcctccatgacgtggcaagtgaagacaggaatgaaaggaatgtaaagcagcttttctctgaagagaagaagagagagagacacagccaaggtacgctgaggtggagaagagggaagctggagggctccgtggtggaggaggatcttctcctaaggaatgaggtggtcgtgtgctgaggggtgtggggaggagtggagagtagaggagagtggagctgtctgagagccactgggagggctcagtgtcctaggacgtgatctagaggacagaaagtggtagaacagcagggagtgccccactggcgttggatggcagcagtgagcactgagacacattcctggaaaaagtcgtggccaggaggaagtggaaatgtgcatggcagggatgatcctggttccagcatccgtagatttgatctcagtgtgctgattcatgaactcttggaccttactatcaatgaattgcattcagttgcacatgggtgtgtttgtgtgtgtgtgtgtgcgtgtgtgtgcatacaatggaggaagttgaattcattctctcttttttttagcaacctcaaatcattcttttctgtctcaaacactttgtttatgagtgcatattgtaaagggtggtgggtggcagagtcagtgcctggccaacagtgaagaagtattcagcttggctgggtgcagtggctcatgcctattataatcccagtactttggaaggccgaggcaggtggattgcttgaggtcaggggttcaagaccagcctggccaacatggtgaaaccctgtctccactaaaaatacaaaaaattaaccgggcgtggtggtgcacacctgtagtcctagctactcaagaggctgaggcaggagaatcacttgaatccaggaggtggaggttgcagtgagctgagatcacgacactacactccagactgggcgacagagcaagactccactcaaaaaaaaaaaaaaaagaaaaaagaaagtgagaagtattcagtttgagtggatgataaaatcagttatttgaatgaaggctatctggagggaattcagttcagaaaaatcagatgctctttttagaaaagtcagattgttacttttccagctagattattatttttggattaaattccttgcaaacattttagctggctctgtatttatcctttgtcattttctaaattacaatgatctcctcctgtaaattgatcttgtacactgaacatgtgattgtgtgcaatattttcctaatcctgggtacaaggatatgagaacacaggaagccctgtgttaaaggaatgcccgttttaaaggcacgtaagtggaatgctcatctcttcaccctcaagagccattctgtagaaagtcctcagggcatgaaagtgctttgccggggacctttgaggctaagtgtaaagcttttggaactggcagtgtgccccagacttgtctaaagaatgggaacagtggcctgaaacaccaaatgtcaaaagcaatgtttgtttggataatatagaggattgattctgccctaagaaagttgtttctctcaagaccgaatgctgaatttaaatattattttccttcaaagttttgagttgactttgagagtatataaaaatattatgtttaggccaggcgcagtggctcacgcctataatcccagcactttgggaggctgaggagggtggatcatgaggtcaggagatcgagaccaccctggctaacacggtgaaacaccatctctactaaaaatacaaaaaactagctgggtgtggtggtgggtgtctgtagtcccagctactcgggaggctgagtcaggagaatggcgtgaacccaggagacggagcttgcagtgagccaagattgcgccactgcaccccagcctatgtgacagagtgagactccatctcaaaaaaaaaaaaaatacatatatatatatgtgtgtgtgtgtgtgtgtatatatatgtatatatatatatgtatatatatatatgtatatatatatatatacgtatatatatatatatatataatgtttaaggattcataggtggattagtttctttttaaaaaattcaatggcacaaataattagagaaataaggctgtattatctggctttgggcaagtcacttagcctcactgtgccttacttttctgcaagagtggattggactagatcatctatatcttacctgccaatgggcacccttttgggggctagagctgtgtttggttcttctctcctcctttccttcttcctttactcttgaggttcacagtagggaacttagaaaatttactctgattttggacaaattggactgtgtttgctaatgcttggcctgtttcaactttccaagaatcagcaatgctatgaaatgttgcacataaaaaaattgagctcagacaggaaacttctagagaaatgtcaaagatgtcatggttcaaagagattgtctcagatatacatcatgggtaagaaaaagtaggagttcccattttaaaagttatttttttgagacagggtcttactcttgtcaccttggctggagtgcagtggtacaatcatggctcactgtggccttgcactcccgagctcaagtgattctcccacctcagcctcctgagtagctgggactacaagtgtgcaccactctgcctggctaatttttaaatttttcgtagagatgatttctcactatgctgcccatgctggtctgaaactcctgggctcaagcgatcctcctgcttcagcctcctaaagtgatggaattcagacatgagccatgtgcctggcctcatttttaaaatttttaattaaaaaaattttttttaaatagagacagggtcttgctatgttgcccagactggtcttgatctcctggcctcaagcaatactcccacctcggtcccccatagtgctgaggttataggtgtgagccaccgtacgcagccatggttcccattttctagatgtatctcccaactagaactcacagaatttggggaggggaagttatcaactgtctcttctcctgaaaataaataaataaaaccctctcctggtgctccatttcctctttagctgctgccctgctccctcctttctcttcacagttggtgtttttaaaagaaagctgtagttgatttctgtgcccatcttttttttggaatggagtcttgctctgtcccccaggctgcagtgcagtggtgcaatctcggctcactgcaacctccgcctctcgggttcaagcaattctccttcctcagcctcccgagtagctgggattacaggcatctgctaccacgcccagctaatttttgtatttttagtagagaaggggtttcactatgttggccagactggtcttgaactcctgacctcaggcgatccaactgcctcggcctcccaaaatgctgggattacaggtgtgagccaccatgcccagccaatttccatgcccatcttttcttcaccagccactgactttctctgagtccccagaatcctgcccatttcactccattgaagtggatccacggggtccccagtaacctccagatctttctcagccctccccttcatgaacactccatgattctcaagacattttcttcttttgagttctcattcttctgattatcctcctccctctgtttcttgtttgtctcctctgtgcagccttgaaatcctggaatttctctgtattcaggcttggacctccactgcctctccctcattatgggttgaagtgtgctgccccattccattcatatgttgtagttctaatccggaggatctgagaatgtggctgtatttggaaacagggtctttgccgagataattaattaagatgagtttatagcagagtggggtgggcccctaatccaatatgattggtgtccttataaaaagggatttggacacagacacacacatgtgaatgtgaaggcatagattggagtgatgcttctccaagccaaggaatgccaaagattgccagcaaccaccagcagccaagtaagagacctggaagattcttcctcacagccttcagagggaaccagccttgcgtggcatcttgatttcagacttctaactttcagggctgagataatacatttctgttggttaagccacccagtttatggcactctggtaccacagtcctaggaaactcatacacccaattctgcggtccccaggctagtggttgtccaatgtttttgtctcaggtcctctttacactgttaagaattattggggtccaggtgcagtggctcatacctgtaatcccagcactttgggaggccaaggtgggagaattgcttgaggccaggagtttgagacaagccttggcaacactgtgagacccaaactctacaaaaaaaaaaaaaaagagagagagagacagagaaaaatttctttaaaaaaaattgctgagaagattaggaacaaggcaaggacattgttcctcaccactccatttcacatcatactggagtcctaactaatgccataagaaaaagaaatgaaaaccatactgattaggaaggaagacataaaattttattcacagatgacttcattgcctgtatagaaaatctgaaagaggctgggcgcggtggctcacacctgtaatcccagcactttgggaggccagggtgggtggatcacgaggttaggagttcaagaccagcctggccaagatggtgaaaccccgtgtctactaaaagtacaaaataattagccaggcatggtggcaggtgcttgtaatcccagctacttgggaggctgaggcagagaattgtttgaacccaggaggtggaggctgcagcgagccaagattgcaccactgcactccagccttggtgataagagcaagactcgtctacaaaaaaagaaaaagaaaaaaaaaaagaaaatctgaaagaatcaaccaaaaaaagctttcctggaattaagtttttgtataacaaatccctttttctccatacctgttcataaggaccagcaggagcagggtgcttttagctggcaaggccagcagtacaccttcacggtcctacctcaggggaatatcaactctctagccttgtgtcataatttagtttgcaaggatcttaatcatctctcctgtctataaaatatcacagtggtctattacactgatgacaatatactgattggacctagtgagcaagaataacaactattgtagacttattgataagacatttggatgtcagagggtgggaaataaatcagacaaaaatttaggggccttctctctcagtgaaatttcttttttttaattttttttttattttttctttttgaggcaaagtctggctctttcacccaggctggagtgcagaggcatgatctcggatcatagcagtctcaacctcctgggatcaagtgatcctctcacctcagctttcaagtagctggaagcacaggcatgcaccaccacgcccagctaatttttgtttatttttcatagagatgaggcctcactatgttgcccaggttggtctcaaactctctttccccagccatccctgacattgcctaatgggctcatgaacaaagtggctatggtggcagggatggaggttgtgcgtgggctcagcaacatggacttccactcaccaaggccaacctggctgttgccactgctgagtgcccaatctgccagcagcagagatcaacactgagccctcaagatggcactattccctggggtgatccgccagctatggtactggggggtccatagactggtaccagtccatggcctgttaggaactgggccacatagctggaggggagtaggcatttccacctgagcctccacctcctgtcgtgtcagcagcaccattagatcctcagaggagcatgaaccctactgtgaactgtgcatgagaagaatctaggttgtgtgttccttacaaatctgatgcctggtgatctgagatggaacagtttcatgcccaaaccatctcccaacctccattcgtggaaaaactgtcttccacaaaacaggtctctgatgccaaaaaggttggggattgctgctttactgcatctcttaatatgaccctgctctataattagggtcaatgggaaactgcaacaacacaacccaggcagaactacaaatggcccacactcttcaggaatgaaaatttgggtcactccaccaggtaaagaaccacaaccagctgaggtgcttgctgaaggtaaagggaacatagaacaggtattctgtagtgtaggtagttataaatactggatacaaccacatcaccagctccagaaacaaggactatcattgtcaatcagtatcttttcctttattttttatgaacacacttgtgcatatatatactcatattaagcaaatatctgttttctctcttttccttttatcatgagacataaaatgtattgattttatatcagtatttaactattgttaattttacatcatagtaatgaagttatggggtatcaggagaagagtatacaccactcaagcagtttacctcctcttctggggaagagattagtgcattttcagtcgtatcatgttgggtagaattatgaccctgtcattgtctttatttggagattaagtgtggtttaagagttgcacataggtgccaagttgacaagggttggacttggaaaggttaattttatggtcaacttgagtgagccaagtgatgtccacatagctggtaaaacattgtttctggatgtacctgtgggggtatttcttgaatagattagcatttgaatgggtagactgagtaaagaagacagatattccatctatatgtctatccttccaccaatattacaatcttttatttatttatttttttttaagatagggtctcactttgtcacccaggctggagtgcagtggcatgatcatggctcactgcagcctcgacctccccaggctcaggtcatcctcccaagtcggcctcccaagtagctgggatcacaggcacacaccacaaacctggctaatatttttattattattatttgtagagatgatagtctcactgtgttgcccaggctggtctgaaactcctgggctcaagcaatccacctgtcttggcctcccaaaatgctgggattataggctcaagccatcgctcctggcccaataccacagtcttgattactggtgctgtacagtaagtcttgaagttgggtagagcgtttctcccacttcattcttctattcacgagatctctgctgctaccaccggggctggaggagcagagatgcctcattactgctctgcatgtgatcttcaccatcaatgatcgggggaggggagcttattaccaatggatgggggtaaaagttctgattaggtttcttctgacacccccaacaggggcaaacaagggagccttgttaccacagagtggggctgaattcagactccccactcggcctggaagtctaggctccccacttgggctttgctggcaatggggtggggggcagggccatagttttttctgtggcgtttaactggattcgcgtgattattgtctgaaagttttctttcttggcagactgcccctttcctggtccttttgctagagcgagcaggctttctttggaacttttctgctgcacatgtactggcttctgccgcactgagtccggaatatacagattgattatctgtcccttatctgaaatgctcagaccagaagtgttttagatttcagactttttcagattttggaatatttgcatatatatatatatatatataaaatgagatgtcttggggatgggacccaagtctaaacacaaaagtcatgcatgattttttttttgtttttgagacagtctcactctgttgcccaggctggagtgcagtggcgcgatcttggctcactgcaacctttgcgattctcctgcctcagcctcttgtgtagctgggactacaggcacccaccaccacgccccgctaatttttttgtatttttagtaaagatggtgtttcaccacgttggccaggcttgtctcgaattcctgacctcaagtaatctgcctgccttggcctcccaaagtgctgggattacaggcatgacccaccgtgcccagcctcatgtatgttcatatataccttacacacatagcatgaaggtaattttatttttcccttgaggactctgaatgaaatatgtgttgtgtgcctgagttttgattgcgacctgtcacatgaagtcagcgaaattttccacttgtggtgtcatgttggtgctcggagtttgggattttggagtatttccgattttgaattttcagattagggatactcaacctgtaggaagtaacaagaaaacccagagaactcacctctgtgttgtttcttgcatcttctgattctcagagggtctatcttctgtccagctttcacagtctgcttatgtttgctgtatatatactgtacagggtttttatttttactggttgggaagaaaaagtatttctactccctttttccagatgcagaagccaaagtaatatatatgtgtgtgtgtgtgtgtgtgtgtgtgtgtgtatttttttttttttttttgagacggagtttccctctctttgcccaggctggggtgcaatggcacgatcttggctctccacaacctcctccttccgggttcagctattctcctgcctcagcctcttgagtagctgggattacaggcatgcgccaccaagcccagctaattttttgtatttttagtagagatggggtttcaccatgttggccaggctggtcttgaactcctgacctcaggtgatccacccacctcagcctcccaaagtgctgggatgacaggcgtgagccaccgcgcccggccataatatttttaaaaatgtgaaccaggtcatgccatttccctgcttaaaatttcccaagggcttcccaatgctattagaataaaattcaaattccttattggcccagcagacttggggcatggcttggcccctgcctcctactctgacataccatacacatactttttttgttgttttttttttgagacggagtctcgctgtgtcttttaggctggagtgctgtggtgcgatctcggctcactgcaacctccacttcccgggttcaagcgattctcgtgcctcagcctcctgagtagctgggattacaggcacacgccaccacacctggctaaatttgtattattagtggagaggggagttttcaccatgttggccaggctggtctcgaactcctggcctcaaagtgatcctcctgcctcaggctcccaaactgctgggattacaggcgtgagccaccgcgtccagcctatacttccactttctaagtaagcctcttctgtttttcagataaggtcactgaggccctgaggttaaatagctttcccaaggtcacgcatggtaaatggcagagctgggatcctgactccagtagttgggctggagcctctgctcttaaccattaggtacgtgtactcttttctccacatgttcctgagtggtttctgagcacccagacgtttgaaaactatggccccacccgctgactgggagacaaagcaaacacctgccttggggaagagcaagatgagaggtaggagggtgaagtggagagtggagggaggcacgaattgaggccagggctcctagtgcctctggagctcatatgaagggagaggtagaatcaacacagttcttatcttcctgctcttctttgcaaatcttgagttcagcctttggaacttcatccaggtgtctggattcttggacagatctgccctggcaggatgggtgggtgcagctgagctccgcctctcaagaaacgcaagcaactcctttcctccagggtacagagcaggtgctctctcagagggctgggcctccactgccccaggttcacaatcgctgcctcagcttagctgattttcccaaaccgcctacagctcctccctgctgcttcccagcctaaagtttgatttctcaccctgtgttctctaaacaatcgttctaatttgatcatgcacaagtatcacctgaggagcttattaaaaatgcaagtcttggccaggcatggtggttcatacctgtaatcccagcactttgggaagcagaggtgggaggattacttgtaggctaggagttggaggccagcctgggcaacatagtgataccctgtctttatgttgtcatattttataaaaattaaaataaaaaaatcagccaatggctgagcacggtggctcacgcctgtaatcccagcactttgggaggctgaggcaggtggatcacaaggtcaggagatcgagaccatcctggctaacccggtgaaaccccgtctctactaaaaatacaaaaaattagctgggcgtggtggcgggcgcctatagtcccagctacttgggaggctgaggcaggagaatggcgtgaacccaggaggcagagcttgcagtgagccgagatcgcgccactgcactccagcctgggcgacagagcgagagactgtctcaaaaaaaaaaaaaaaaaaaaaaaatcagcccaatcatagtgatgcacacctgtagtcctagctactcaggaggctgaggtgggaggatcacttgagcccaggaggttgaggctgcagtgagctgtgtttgcgccaccacactccagcctggacaacagagcaagaccctgcctcttaaaaaaaaatgcaaatcacagacaatctaggaaacttgaatcctagaattaaggcaaatttaagaattattgaattttaggagtgactggtattttatgtgtgtttgtgtgtgtatatgtgcgtataaaagaatccttatcttttagagatacctgctggaatattttgaaagaaataatatgatgtatgggatttgcttccaaataatcagaggtggggaggggaagtgggtggggtgtggatgatagaacattcatgaactggtgtggccaagtaatgtgtacgtaggggttccctgtactatttgctgtacttttgcagaaaagtacagaaaagttaaaaaaaagcacccccctcactcattctggggtaccttctaaggccactggtggggagagtccctgtgggggatctgtgcaccaccctggagaagcaaagctcattcaaacaaacgcaggtggctgttgcagccccgcacccctgggcaagagaaatgcacctaattggcttgttctgcccctcgcaccctctgtcaaagaaataggaaaagacaagacccctccaaaggaaaagggcacatatcacatatgcttctgtctctttttacctgggccacagcggaagctgaatttcagccattgggcatttcataaggagtcttctattttcctttgaaagtagagtgttttggttaatagttgataggatggtgagtgtgatattttttattttccaaaactattttaattttttcatttatatatgtatatacacacatatatacacacgtatatacatatgtgtatatactatatataatgtatataatatataatatataatgtatataatatatataatgtatataatatattatatatatagatatatatatttatttatttatttttgagatggagtctggctctgttgcccaggctggagtgcagtggcgtgatctaggctcactgcaacctctgcttcctgggttcaagcgattctcctgcctcagcctcctgagtagctgggattacaggcacccgccaccacactctgctcattttttcgtatttttagtagagacaggatttcaccatgttggccaggctagtctcaaactcctgacctcaaatgatccgcccacctcagcctcccaaagtgctggaattaccggcgtgagccacggcgcccggcccccaaaattatttttcaaagttattttgtttttacaagttcaagggatgttttggtttactggggtccttctaaggcctccaggaatcttgtcctcaaccttcagctccctgaggggcaagttactttcattagaaaataaatgaatgcttcctgctgggaacttaaggtcatggcagagggcacaggtggggcgggggctgagcaggctggccggtggggcaggtttgtcttcacccacaacaggccagtgttgatacaacagagctgcctcctggctctttgggagcctgggaggagaaggagccgggaggggcgctgcggggaagccacctgcggattcactggctgctgctccgcccaggactgctagcaagcacggagggctgccagacctggggctccctgctccgtgcgtcaggttggggaaaccaccgtctgccccagaccctgacccaggacccgcctggaggaagctggggtaagaagggtgttgatgctgtgcttttgatctgcataaagtgaatgccttgggtctctggtctatgttcacttggctgtagttactagacagggcagtaggagagctttgaattcatcttggtgtcaaaaggcacaaatgtgggcccagaccatgtgcacttcctgagggatgatgtttatcctctggtctatacatggggtattgcttctggagtacccactttgtggtgctgttgacctagaccggtgtgggagtggaaacagggaatggttctagcctcgtggacttcactggtttgtgtgtggggaatccaggcagttaaacaagcgattgcaaatgattgctcttctgggggcatgtaggagggggcttagctccttgagggagctggaggtgtcagggaaggcttgtggaggaagaagatccttacatggagactggaggagtgacagggtcatgcggggcgtgggatggacggtggagaggaggatattgagtttccaaacccaggggaaagcctgggcgaagggcctgaagggggtgggagctgggagaaatgcagggtccctggagaggccaaagctggaggaggacacagaggaggccaggtcctgcagccttcggctggccagctcgaggactttagagttggtcctgtgtgaaactgggacaatgggtaggcccagtatcgagcacacagtagatactctgtacgtgataaaattaaatctactctggaggtgtggaaattcttccagaaggttgacctggggggaaaaagtgtgatttggcagcagtagggccgtcgggaggatctttgggaatagcttctgtgccctcctcctccccttggctctcatgtggccttcaacttcaccattggaaagagcttcactttcttccaacccctgggaggtgtccttccctgccacctgttctaagtgacactaaaggcagtccaatgggcagcatgacttggatggtctattaaggaatggagaaatgttcaggagtgacaaactgccccaccccagagtttggaatgcattgatcgctgctgggaggcctctgatgaccagggctccgttccctggctacgtatgctgtgtgcgggctggtggcaatggcttcaagatcatcccccagtttcacagttaaactttggacatgcatctgttacagtatggtggatgttttaatctatttcagtctagatgtttgagattcccctttcaggagtgtgagtcttagtctttctttaatcagcagtgtcaatacacacttatgactgtatggtggaactgtgtcttgcaggtcagttttggctaacctaactcgcaccattcccctgccccactcacccgtgggcatccttcttccatatacaggacatacagatttattttattcctgctgactgcacagggctctgttatatcacagtttatttaatcattcccctaatgatggatatctaggttacagccatttactataattattacatacaatattataagaaacattcttgttcatctgtttctccatacatatccaggtctatctggataaatagcagtggacatcttgatttgtgggtatgagggatataagatttgatagacattgataaattgctctctgaaaaagctacaaagaatttacacgttaacgttggatatacccaatgggcatatggattaccaaatctcattctgatgacaaaaactatttttcctgactagggaaattgaagacaaagtattctggaatccagagttggttgtgatacccacaactgagttctagagtgacattcgagtgcatgaaagggcctgttttctcataccctccacaacttgagtctttagtcatattttaaaatattttgccagctgagagcagtggctcatgcctgtaatcccagcactttgagagaccagagtgggaggatcacttcagtccaggagttcaataccagcctgggcaacacagcaagactctgtctcaacaaaaaaataaaacaactagctgggtgtggtggtgcacacctgcagtcccagctacataggaggctgaggcaggaggatctcttgagcccaggaggttgaggctgcagtgagtcatgtttgtgccactgcactccagcctgggtgacagagcaagactctgtctcaaaaataaagtataatattttgccaatctgatggagggcataaagtgctatcttgtttttagaatcaggatagctgggcatcctggtgcacacctgtagtccccgctattcaggaggctgagatgggtggattacttgagcctgggaggttgaggctgcagtaagccagaattgcaccactgcattcgagcccaggcaacagagtgagaccctgtctaagaaaaaaaaaaaaaaaaagtctcctaaaatcagaagtgattcctaatggattttttttccctgttagattttaatttaacttaaaaatttcaccctaaggttttcacacatttattaccttaaatattaatatctttttctttttctcctgtagaccgaggctgggccaagatggtgtctgtgtttcgaagcgaggagatgtgtttgtcacaactgtttctccaggtggaagctgcatattgctgtgtggctgagctcggagagctcggattggttcagttcaaagatgtaggtactgagttctttggagataagaggaaggcaggggtgggagtagataactcttgcacaacacttctttatggtgaacaataaccattttgtagggagaggagccgtgagctggaatcgatgaaattctgtagttttagtgcttctggctaggatttgtcatgaccaggcaggtcattcaagagcgtgttctccctccctccatgcctgtctcctctataggaatgtcttgaagctctaatgcaatcactactcattagatgtcattgaattttttttctcttatgtagcatcttcaaacattgtatatagccaatgggcatgtagattaccaaaccttattctgaccataaaaactatttttcctgactagacaggctgaagacaaagtattctggagtccagagttggttgtcatacccgggattgagttccagagtgatattctagagttagacagtcttgagtatgacatgggggtatcatttcccaggggcagtttagaccctcaccaagttcgtagtctaattgagaaaaccagtccttctttacttcttcactaaggtcaaggtcagagctaagctcctgcagggaagaatcacatcttgttgttcgcatccctagttcttcacacaggacctcgtatgaggcaggtcctcaataacgtttattgagctgagctgagagttgaagttttgttgatgactgtgatacgttacatggagctgtgcaatcttcaaggtctggtcatttttatgaccccattgaggattttgaggctcatttggatagccaaggcagagaaataaggtaaacttagatgaggacagacttcctttccttccttccttcctttcttccttccttcccctccctctcttccttccttccttttttcttttcttttcctttctttttactttacttttcttttttcaggcagatatatgattttctcccatgctgtgggtttttttcacttcctattaagaaagtgaaaggacactgttaagtgtcctttgatgcacaaaagttttaaattttgattaagtccaattttttttgttgttgttgtttgagacagggtcttgctctgtagcccaggctggagtgcagtggcacaatcacggctcattgtagccttgacctcccaggctcaagccatcctcctacctcagcacaccaccacgctcggttaattttgtaattttttgtagagatgaggtctcattatgttgcccaggttggtctcgaactcctgggctcaagggatccaccagcctcgacctcccaaagtgttgggattacaggcatgagcaactgcacctggccaggactttgtttcttttagaaacgagagggtgaatgttgaagcatttgggggattgaatgtaagaacactaaggtgtgttttgcctgtaactcacctgtcttgtgcatggaagtatctgttcctaagataattccagcaacattctctagtattaaaaagataataaaatgaccaaaagggggcttagcgcagtgcctcacgcttgtaatcccagcactttgagaggctgaggtgggcggatcacctgaggtcaggagcttgaggccagcctggccaacatggtgaaaccccatctctactacaaatacaaaaattagccaggcgtggtggtgggtgcctgtaatcccagttacttgggaggctgaggcagaagaatcacttgaacccaggaggtggaggttacagtgagctgagatcgcgccattgccctccagtctgggtgacaagattaaaactcagtctcaaaaaaaaaaaaaaaaaaagaaagaaatctattggcagctgttgctactaacatgtatcttgtgattttcgcccccatagttaaatatgaatgtgaacagctttcaaaggaaatttgtgaatgaagtcagaaggtgtgaatcactggagagaatcctccgtaagccaattttttttttttttttcttactgttcaaatgtgaactggcaagggggttaatagtttgcaggacttaatgaacaaatgtgtccctatttgcaatactttttgaggtggtcccagaggcccacctggagggaatgggggaggttgggggtgggatccaggtgctgtggcagctcctaggacaattcaggtagctgagctgagtgaaaggcacatgtcttgcttgacctcatttcttagttatgagaaaacacaatcaccttggggtttctggtgggttttcattcttcaggttttctggaagacgagatgcaaaatgagattgtagttcagttgctcgagaaaagcccactgaccccgctcccacgggaaatgattaccctggaggtaagttctccactttgctggcctccccaggtaaggacagtcatgaagcctgtctccttgaaggccctgagagccacttgcagattccgtacctgtttgcttgaaggcagggaggcaggcctgcatggtcgtctccctctcagggttacagccccaggaaaatcccagtgtgcggtttttagagccacacctgctgatctggagacagctgttttcctttctcagcatagccctcgggaagcttagcccactttgaggagttgattgcttttgtgggtgtttgattcttacaggcagtgtggtcttgtctgctgggtgccactgaatgggctgagtgtgggcataatgggatgttttctaattctctggtgggaagcagctgatgagttggactcactccagatggaagctgcttctctgactggcttctgtaggtcaactgggagaagactgcagttttcaaggacatttcagctggtggggctctccctctttcctttccttgtctatttccttccccttcagtcttttataaaacactgaataccagctgggcgcagtggctcacccctgtaatcccaccactttgggaggccgaggcaggcggatcacgaagtcaggaattcgagaccagcctggccaacatggtgaaaccctgtctctactaaatatacaaaaattagccgggggtggtggtaggtgcctgtaatcccagctacttgggaggctgaggcacgagaatcgcttgaatccgggacgcagaggttgcattgagctgagattgtgccactgcactccagcctgggcgacagagcaagactccatctcaaaaacaaacaaacaaacaaacaaaaaaaccactgaatacctgccacgtgcaaggtagcttagaaataaacatgactgtgccctccaagggcttatagagcagatggtggggacagggatgaggggcagggctgggagaggaagtgaagaggtaggcagagccagatcatggaggaccctgggggacttaactgaaaaagcaggtattttatcctcggcagtggaacagctcattcagggcgtgggcaggtaggcaaggcttcacctagctgagccttttctctggctgggttttttttttttttttgaagataacttcaaattcttgaaaatttcaaagccatgagtagtataaatcttgatactcacatagaaatattagattgtcaaatcttctagaaaatattttggaccttatcatatttttttgagatggagtcttgctctgttgcccaggctggagtgcagtggtgtgatctcggctcactgcaacctctgcctcccaggctcaagcgattctcctgccttagcctcccaagtagctgggattacaggcatgcgccaccacgcccagctaatttttgtatttttagtagagacagggtttcaccatgttgtccaggctggtctcgaactcctgacctcaggtgatccgcccaccttggcctcccaaagtgctgggattacaggcgtgagccacctcgcctggcctgtttattgatttttgactgtattacaaattaaaatggaaaagtatgtaaaatatttatgtattaattcacttgaaaataacaataatgtctcattacatggtaacattttttaagtgaaaaatgactgtcttttccaagacaaaaacactttcatgagaaggatggcattgtttgtgaatttttaaagtgcttggctaatagaaacagctggtttctcacacctgcttctactttaaatctgttggtgatgtgctgtttttattgaaggagaggaagataatccagccttacacagataagcagtgggaaaagggaggaatattttaatagccttttcaaataattatggatattcttctttgatattacactgaaacttgaccagcatagagcctgtcttgattttgttaaacaggtaacatgtgctgcttttgttttcaaactgagttggctgtagtaccttaataaaggaattcatccaactgggtttagttttggctgacttcaaccatgccaaggcacacacattttcaagtttaaccattttaagtttaaaagattcaatcttgactgatattaataagcttttctgggtggggggagctaaaatttgagtggatagccctttttatttttgggggaaatttattgttttgggctatatcgtttatcttttatctctttggtaagggtgtctcttagatggattaaaaaaaaaatgtctagcatgataggccaggcgcagtggcttacgcctgtaatcccagcactttgggaagccaaggcgggtgtattgcttgaggtcaggagttcgagaccagcctgactaacatggtgaaaccccatctctactgaaaatacaaaaatattagccaggcgtgggtggcgcatgcctgtaatcccagctactctagaagctgaggcaggagaattgtttgaccccaggagagggaggttgcagggaaccgagatcgcactactgcactccagcgtgggtgacagagcaagactgtgtttccaaaaaaaaaaaaaaaataataataacatgatattttaaggtgttaaagctctacattcatacatttgtaggaatagataaggggcaatcagatgtgtgcacaagtccttccttagagtttttcttctgaatgttatttgctgtaaaaatgaaattaaaacagcaccagggctggccatggtggctcatgcctgtaatcccagcactttgggaggccaaggcaggaggattgcttgagctcaggggtttgagaccagtctgcccaacataatgagactctgtctctacaagaaaataaaaataatcagctgggtgtggtggtgtgcacctgtggtcccagctacttgggaggctaaggcaggagagtggctaccagaaggtggaggctgtggtaagctgtgttcacaccactgcaccctagcctgggcaacagagtgagaccttctctcaaaaacaaaaacaaaaacaaaaacaaaaacaaaaaccaccagcataaaagtaggagagtaatatcttttaccattcattgctcactggaattgatttgttgattgattgatttgactaatcctgcagttagctgtgttcccccaacattgctagagagttgaatcctttggcaagagtacaccaatggctctgggcccctgccttgtcgagtttctaaagaggcttttataacagtcctagaggaaatactaattcaggggggagggaaaaaaccaccatcccctcagaaactgccctggcttttccttgttttcaggctttattctcatgcagctatacttttacataattatatatccattgtgtatagtaatagcagcattatttttatggcatccttaagtggatagaggaaatgattgggaaatgaagatttacttttccccccaactttgtgtcattatattcagtgttcaaaattcagggtaatggctttctctgagacgggaggtaatggagtggaactgaagctggatgatgggcggataggattcacgctgcttgtgtgtgtttgaaattttccatagtaattcaattttgtctaatactaagcatttcagggagagctaacatttacaggattatcattttttattgtttaaaaaaaatctctttgtgccaggcgcagtggctcacggctgtaatcccagcactttgggaggccgaggtgggtggatcacttgaggtcaggagtttgagactagcctggccaacatggtgaaaccccatctctactaaaaatacaaaaaaattagccgggcctggtggcacacgcctgtaatcccagctacttgggaggctgaggcaagagaatcacttgaacccgagaggtggagtttgcagtgagccaagatcatgccactgcactccagcctgggcgacagagtgagactttgtcttaaaaacaaaaacaaaaacaaaaactctgttaacagtgtcttttagatggattaaaaactagcatgataatctcttctttaataggtgaccttaatccatttccgtttattgtgatttctgattcactggctttttcagttattattccttttgttttttacttcccttccctttcctgtctttctgtaatacctgccaacccttccccactactgattggtgtgcaagctacagatgacagttacacttaacacttcaaggcacatattcactaaatttttctcataatatttgctactggttcaattatcacccctttgtggatatatgtcctttttttccctgatagcctttaaagttttatctttgttctatagtttcactcctgtctgtttcagtgtggatttgttattgtttttgttaaacattaaattgcattagtagaatttttataaaacatgtaaggtataaaaagtaaggatcagcacacaccatgtgtctgtcgccctgtgtaagataacggtacccacaggggcattcaaaaaacctgtgtgcccctcctcacccctcctccatctcctttcccctcttcccttcgagatcatcattatcctaacttctgtatttttctttattttttcatagttttattacatatttatttttctaaataacatatggtatagctttacatgttaaaaaattttctctaaatggaactatattgtttattcttctgcaacttgctatttcatcaatttcatatatattatatacatatacatatatacatacgtgtgtgtgtgtatatatatacatatatatatatatatattttttttttgagacagagtctgaaaaaaagctttgtctcccaggtgggagtgcagtggtgcgacctctgctcactgtaacctctgcctcccggattcaagcgaatctcctgcctcagcctccagagttttgcccggctaatttctgtatttttagtagaaacagggtttcaccatgttggccaggctggtcttgaactcctgacttcaagtgatccacttgcctcagcctcccaaagtgctgggattacaggatgagccaccgtgcctggcccatcattttctattttaagactccatattgtttaatgtttctgaagttatttttattgttatttatttatttttttgaaatggagtcttgctctgtcgcccaggctagagtgcagtggcacgatctcggctcaccacagcttctgcctcccgggttcaaataactctcctgcctcggcctcctgggtagctgggattacaggtgtgtgccaccattcctggctaatttttctatttttagtagagatggggtttcaccacattaaccaggctggtcttgaacgcttgacctcaagtgatctgcacatctcggcctcccaaagtgctgggattacaggcatgagccaccgcacccagcctggcctagtgttttaaacgagaggaggcatgatttgccaaaatgtcttaacttctccatgaagtggccatccactcctccaagtacttcctaatcctctcgtttggtgatggaactcttaagagagcatgcacgtgtgtgtgtgtgtgtgtgtgtgtgtctgtgtgtgtctgtgtgtgtctgtgtgtatgtgtattagggtctgcaatcatgttatgtgctgattcctttgattttttttagtcatctgttgtgggtaatgtatttcaggaatgtcatagcactttctgttggcttaccttctttttccttcctgcatagactgttctagaaaaactggaaggagagttacaggaagccaaccagaaccagcaggccttgaaacaaagcttcctagaactgacagaactgaaatacctcctgaagaaaacccaagacttctttgaggtggtcacgtggggatgagttactaaagggcccgttcctcagaacctcaaatttccattttggaaactggctggcctgggatctgagtaaatcactctgtttctgttccatggctaggccattggtgagggcgggggagtattttgggtggaataattgtagtgctggttggattgaagggaaaaatattatggtgctcagtaaaatgtatgtgctgaaaatggctcaggcagaaagagaagtcagaaccaagcacagcagttggtttgagaagttttagggttttggtaggaaaagaccagggaagctttttgatctggccaggagcactctgttttctgacttctgttaactttttgtggaaaattaaagcttcactaaaaccagagaaaatcttgaggtgtaggtgccttttgagtttccctaaatatatttaaatgaaaatcatagtgctttgactttcagacggaaaccaatttagctgatgatttctttactgaggacacttctggcctcctggagttgaaagcagtgcctgcatatatgaccggaaagttggggttagtgtaattcttgtgtgtagatgggtccctggtcctggcgagtgatttctgagtgagtgaatgaacgggtgaacaaatagccattggaatggggactgtttcccatggatgcaaagcctctgccaagcgatagacccatatgtaacttactaggttggtggagtcggaagtggtgtcagcttcttgttagtggcgatgctgacctccttgagcctgaagactgcaatgtttatattgctcccccattggaagctgtggggatcattgttcagatgggttatcacaactcttccctggcgttggaacaaggctatggggacttatgtttttcctttctctttaaaatactattttgggagccgggcgtggtggctcacacctgtaatcccagtactttgggaggctgaggtgggtggatcacttgaggtcaggagtttgaaaccagcctgggcaacatagtgaaaccccaatctctactaaaaatacaaaattagtcaggcatggtcgcacgtgcctgtaataccagttacttaggaagttgaggcaggagaatcgcttgaaccctggaggtagaggttgcagtgagccaagatcgtgccactgcactctagcctgggcgacagagcaagactccagctcaagaaaataaaataaaatattactttgataataaaatgcatttggagtttgaattttttttttttttgaaacagagtcttgctctgtcgtccaggctggagtgcagtggcctgatctcgacttactgcaaactccgcctcccaggttcacgccattctcctgcctcagccgagtagctgggactacaggcgtctgccaccacacccggctaatttttttgtgtttttggtagagacggggtttcaccgtgttaggcaggatggtctcgatctcctgacctcgtgatccgcctgccttggcctcccaaagtgttgggattacaggtgtgatccaccgcacctggcctgaatttgtgtgtttttttttgacacgggctctcactctgttgcccaggctggagtgcagaggtgcaatcatagctcactgcagccttgacctctcaggctcaagtgatcttcctacctctgcctcgcgagtagctggaccacaggcacaatgccaggctaatttttaaaaaattttttagtagagacaaggcctcactgtgttgcccgggatacatttttaaatgtaattagaaatgggggtcagatgtggtggcttatgcctataatcccagcactttgggaagctgaggcaggaggatcacttgaggccaggagtttgagatcagcctgagcaacatagcaagactctgtgtctacaaaaaaaaaaattttaataaaaaaaagaaatgggatagttatgcaatcaagttatttccaagaagcagtgatatgatgtgtcgtagccatgaaaataatgtggtgattcaaaatggtaggattttgttcagtgcctaagtgaaattgaggcattttaaagcatttctgaaaattgtgagtttgggatttatgattttttattcaataaatatttgagggcctgatatttgaggcactaggcattgaatttgaaatgaaaataaaaatatttattggaaatatttgatcagaaagtaatacaggatcaatgaacatttaaagtaataagccagtgaaagtcactggctaacatgagaagtttgggtcagcagttatctacatgcttggataatggaaaaaacagatatatatagacatcaatgtatttttccctcttagtattaaaatatttttggaaaaatgcatagagactactgttgaatatttgctatcattagctacaatgcatgatgaatggtctatcatattcttttttttttttttttttttgagacagagtttcacccttctctgcccaggctggagtgcaatggcacattcttggctcactgcaacctccgcctcccaggttcaagtgattttcctacctcagcctcctgagtagctgggactataggtgcacgccaccaggtgtggctaattttgtatttttagtagagatggggtttcagcatgttggccaggctggtctcgaactcctgacctcaggtgatccgcccgcctcagcctcccaaagtgctgggattacaggtgtgagccacggcgcctggccattctatcatattcttaattgcaattagtgacgatatagtattggaatgattaaggatatttcaagataccaaagaaaacagaaggtcaaagggacttggggcaagtcagggctggatgcggggtggccttgggactcatgtcggtagagctgtgtcggggtccctcctgctcacagagtgaatggcccttcctttcatggtgtgtcttcacgtcctacagggccttctctctgcatcccaatccctgtgccttaaggaatgtcttcccttctggctgcctaggttcatagccggtgtgatcaacagggagaggatggcttcctttgagcggttactgtggcgaatctgccgaggaaacgtgtacttgaagttcagtgagatggacgcccctctggaggatcctgtgacggtgggaaccttgggctgcaaaaactttctctgagacttcccatagccctcagcagaagcgcttcgttctcccaaaacatgggggatctttagtttgatgagactaatatctatttcctttttttctcctttttttccttcccttttactttgttcctttttaaaaatatatatttgaaaggtcagttcaaggactgattcttgtcaacacctcataactggtttattcttcccagagacatagctatacttttctctagaacttagttatactagtactatcctaggcggcagctgtgtcttaaagaactgagaactgattgaggtcagcttctcaagcttcaatgtgcacgcgagcatagaggtcacccggggatcttgttaaaatgcaaattccaggccaggcatggtggcttatgcctgtaatctcagcgctttgggagcccaaggtgggaggatcgtttgaggtcaggggattgagaccagcctgggcaacatagcaagaaaacatctctacaaaaaaaagttaaccaagtgtggtggcacacaccggtagtcccagctacttaggaggctgaggtgggaggacaacttgagcccaggaggtcaaggctgcagtgagctatgatcacaccactgcactccagcctagggaacagagtgagaccctatctcaaaaaaaaaaaaaaaaaaaaaaaaataggctgggcatggtggctcatgcctgtaatcccagcactttgggaggccgaggtgggcggatcacctgaggtcaggaatttgagaccatcctggccaacatggtgaaactctgtctctactaaaaataaaaaaattagccaggagtggtggcgcacacctgtagtgccagctacttgcgaggctgaggcaggagaatcactggtacccaagaggcggaggttgcagtgagctgagattgtgccactgcactccagcctgggtgacagagcaagactccctcaaaaaaaaaaaaaaaaaaaaaaaaaaaaaaattctgagtcagtgggtctgagtggggcctgagattccgcagttcttacaactcccagagaatgctgatgatgtatttgccaatagatcccacacttcaaacaacaaggcttcaagggggctcagcccttagtgccatacagttgttgctgtgaattctgtcggatgttgctgtctcaccttccagtttgtatttaatccacttaccctttaattcccagaagctaggcttatttctgagcgtctataatctttttcagattagaggctaaaaaaattaattttaatgaaaaaacaacaaaattcattttgatgaaaaacaactttaaaataagtgaaatttaaaataagaaagattatgaaaaaaatgagaaaccccatcactctaatgtcttcatttgtattttgcctcttgtactatttctctctatagccgtagacaggtataattttatatgattgtagcatacatggaaataatttttttcttttctttgttttacctaatatgagatccctccccatattactgtgcatccttcgtaaagatcatttttaaatttgacattaaatcatcactttttataatcctgttttgacatatgacagtcatagtgggagagaaagtaaaagcatctggaaaaagatgagcgtggacgccgaaggtcaccaaagggaagtcatgagattagagcagattcctgattctggtggatcaggagaaaagaaaatttaagagactcagaaaaggaccagggtagactccacgggtagagaaaccttttggaaataatgtaacgcagcagctctgaaaatcctaaaacaccgccacttgctcccgtaaggaaatgccaaagacaggattcattttgatagtatttttaaggaatgtctattgtgtccactgagttgacgtgacgttgactatctattttggacactttatttctaatttttctccagaatgtagacaccatgatgagcatctttatgcatgtggatttttatttgcttttgaattactttcataataaacaagttcaagaaaaataggattgctggcttaaagggtgcgggcattttaatgacacccgataggtcccgacaaatggcctttcagtgacttttctgattccagtgcctcgagtagtatgtgatgagtctattggatttgtcataacttttccaacaatagtttttgtttttgttttttggggttttttttgagacagggtctcactctgccacccaggctggagtgcagtagtatgatcatgactcactgcagcctcgacttcctgggctcaaacaatcctcccacctcagccttcctggtagctgggaccacaggtgagcaccaccacactcagctaattcttgtattttttgtagagatggggttttaccatgttgcccaggctggtcttgaacccctgggctcaagccatccacccgccttagcctcccaaagtgctgggattacaggtgtgagctactgcacccggtctgggttttgtcattttacctttaccccctcaaactaaataagattggaagaatgcattgtttcagctcatatttctttgcttacagtaagagttaaacatttgcatgtctgcttgtggaacacatcttcctttcttgtgaattgtccaacttggacttgacaagtgtgatttaagcagcagtcttatggcacacaagcaactgtgagtcaaaaaatctgagcaactgtatgtatgagtcaaaaattgggcatggctttacctttgttaaatataaaacacctactcatccccaaaatgtcggtgttgtgtgttaattaactctggtgagccagtttatcagccagctgtcttcgttttaagccttgcaatattctcttctgaatggtttcttgtttattatcatatctcttaaatgtggggcttagagctgaatataaggtctggctgtggtccaaccagcatcgggaacagggagcctgtcaccttaaggctgcattagcctctgtgaggtcctggatggccttgctctcaactgtgagctatgaacttagatgaactaggaaagttacagtttcccagttttaaatgtatgaattgtgtaagcctaaaaacaggactttacatttctctctattatgttttaaccagaaagaaacccccccctttttttttaacttattctgattttccagaaagaagaaattcagaagaacatattcatcatattttaccaaggagagcagctcaggcagaaaatcaagaagatctgtgatgggtaagagggagtgaatggctctttcttcagtgatttgggccaggattagataaagagatgtgcaatgccaaatgcacacgactgtggcttctagaggtcagtaaggctttagaataactttctcacataaaagtcagccccaactgatttttaatagttgtaagaatatgaatagggagaacttgaatatgcaaaatgtgagggtaactaaaagtggacatgttccccatttcagtctattccatctgagacttttcatcagctgctccagagtaatccaactgcatggctaacttgttttggattttacagaatcgtgttacatgtagctccatagaagcagaaatgactcagtgcagaggatattaatacattaatagattcttaggaaggggcaagcccagcttgcagtcttatttacccagcaactcacaggttttatggtttgaatgaagctcattcatataacagaactgcagcctcaattcacagcacaagtgacgtactgggaacccttatgactgggactccttttccagtggccaaagacgcagttattctaggataggctggccatctaactaaagtcagcaaatgatgtcttagcagaaaaggggatgcagaatgctttgcagcaagaactcacctgtttcctttggaatatattaaacacaggtttcgagccactgtctacccttgcccagagcctgcggtggagcgcagagagatgttggagagcgtcaatgtgaggctggaagatttaatcaccgtgagtgaggggtttgggcgcatggtctgatggcagctgcaggagggctgcctctgctgttttcatacaagccctgccccccagggcccttgctgggaggctggctggaatgctggctatgcctttctggttgtggctgtggaagatttcacaattgggaaactgttcgataagctagagggaacgaagctgtgtcttaagaatgctttgcccagggtcagatttgaccacagccctagtcagccttcaggtggccaccccgatctgataaaaggcaccctttattgccagcctcggcctagacggaatctatgatacaaccacccagccaattaagttgaacaaccagtttgactgattattttcccactgaattgcctggttgtttaagctgatgggttaattctgtaaaaacagtgagtctagtttcaccatgtgaacattcattcatcccaaactcattttctttgtaaagtctgtcaccatccagggtcactcaacacacttatgatcagaaatctttcttcaatcacagcagctttgaaagtaatcactgaaaacagctgggcctccctcgctggcagactctcatcagtgctagagttcgatagaactttcggttatgatagaaggttcatgtgtcctgtgctgtccaacactgtagtcacgagccacatgtggctattgagcccttgaaacatggctagtgccactaagtcatttagtttgtatttttaattttaattcaatttaaattttagggctgggtgcggtggctcatgcctataatcccagcactttgggaagctgaggtgggtggatcacttgaggtcaggagttcaagaccagcctgaccaaactggtgaaaccccatctctactaaaaatacaaacactagtcaggcgtggtggcagtcacctgtagtctagtctcagctactcgggaggctgaggcaggagaatcgtttgaacctgagaggcaaaggtttcagggagccgagatcgcgccactgcactccagcctgggcaacaaagcaagactccatctcaaaataaaataaaaggaaataaaatacataaaatttagtagctgcatgtggctgtggtagaagtcaactcagttttagattctggacaagtatgttaagaaattagatatgtgcctctttcaaaacccttaggctagcagacaactttacttttccagaaaacctgtgtttaatttttttttttttttttttgagatggagttttgctcttgttgcccaggctggagtgcagtggcgcaatctcggctcaccgcaacctccgcctcccgggttcaagtgattctcctgcctcagccttccgagtagctgggattacaggcatgcgccaccatgcctggctaattttgtatttttagtagagatggggtttctccatgtcggtcaggctggtctcgaactcccgacctcaggtgatccacccacctcatcctcccaaagtgctgggattacaggcgtgagccactgcgcctggcctgtgtttaattttttaatcctctccattacttctttgtcacttgtcaggaacactgtttccccgaagccattgaagtcctttccccccaattctccatgcttgattttatgaaaacgtcatgaggagaatggaaaataaattctgctagatgtgtgcttacatttagtatgacgggttgctgctgtgtcgagggcttcagatgatcccagctgagcagcttctgcaggggcagctttctcctttggctcagtgcctgccaaagatgaatcttagacactgtctgatgctgaggcatataattcgggctatgctctttgaggtttctgaaagtcacctctgtgctgaggtgctcttgtctcctggaaatccccaggccagggggcattatattgctaagtgacaggtagtattgggcttgtgagatgcttcggtggcctcatggctctcgttaatcttagagccagcatgtctctcttacagtgtgtctcttacagaggccatgtgtgctgaaaaagattaccctgtttgttgtatcatcaaaacataaaaatgattccattaaataaattctgtgtgggcccaattgtccattcattccttcattcattcacttgtcatttattggagggattatgtatgtaaagggttgtggtagatgtagtaatctcttagggttgctgtaacaaattacagcaaactgggtggcataagacaataaagatttattctgtcatggttctggaggccagaggtctgaaatcaaggcgtcagcagggccgtgctccctcggaagacctgaagggagccccctccttgcctctccccagctctggtgctgcgggccgtcctccgcattccttggcttgcaagtgcctacttctctgcctctgttgtcacgtggtattcttccctgtgtgcctctgtgtctacgtttcttatcaggacagtggtcatatgggattagagcccattcaaatccagtatgacctcttcttaacctgattccatctgcaaagaccctctttccaaaaaggccatattcacaggtatcagagttcaggactcttttatgtggacaattcaacccataacaataggacaatgaggaatttagaagaaaaggaagatacaatctctgcctaagggttttagcctctagcgggggagataaactgctcaggagagttcaaggccagatgacagccacaggtcaaaggagcctgccagagcagaggaagctgctgtggcctgtgacactccatttttggcaccttgtcaaacagctctgtgaaggttctctgttttcctgtgtgttgttttttgtataggtcataacacaaacagagtctcaccgccagcgcctgctgcaggaagccgctgccaactggcactcctggctcatcaaggtgcagaagatgaaagctgtctaccacatcctgaacatgtgcaacatcgacgtcacccagcagtgtgtcatcgccgagatctggttcccggtggcagatgccacacgtatcaagagggcactggagcaaggcatggtgcgtggcaggtggagccaggaggggtccgatgagtcagcccctctgctgggctctcagagggtgttggcctcatgggccacatgaactcaagtgacttggtggtaggattgcttccttcatctttgtgtcttcagttatcaaccccactcgaggacataaaagaaattcctttgtcttttcagtgtttgacagttgttcaccattttttgaccttttgtgagtacgtattgagctttttttttaaaaaaaaaaaaatagaatctcgctctgtagcccaggctgttgtgcagtggcacagtctcggctcactgcaacctctgcctcccgggttcaagtgattctcctgcctcagcctcctgagtagctgggattacaggtgagccctaccacgtccagcaaatttttgtatttttagtagagacggggtttcaccatgttggctgggctgctcttaaactcctgacctcaggtgattcgcctgcctcgacctcccaaagtgctgacattacaggtgtgagacatcacacccggccatactgagcattaatgtgccagtctctcagctagactatcgttttgggggggattttggtcttttttttcttattaaagatggggacctcgctatgacacccaggctggagtgcagggctgttcacaggcatgggcatactgccctacagcctcaaactcctgggctcaggtgatcctcccatctcagcctcccaagtggctaggactacaggcatgcgccaccatgcccagctccactctgctagactgtagataccacctgttacctcatggaggttatagtctagctagaaagatgaataaccaagcatctataataagagccaaaatatgtagatcgcttgcggtgtgtctgagatggctaagcactctgtcctcgttgagttctcaccgctccctccattcattccttagacattccctgtgtactaggaacggatctagggcttacacactggcaggccaagaccctgctttgatagacattctagaaagggacacggaggcatgtccgtgactaatgagatttcaggcagtgatgagtggtgggcaggaaaccaagcaggggacggcgaggggcaggatggagagtgggggcttgttctgatcaccgttattcaccccattgaaggagggaccccctcctgccctaaatagtacaagatggccgaacacattaccctgacactggacagacgggcttgacagctgtttttagtcactcgtcttcagagcccaggggagaaggacaccgcacgccatgcgggccacacagggcttgccctcgggaactgcgtttgggagcagagtgaagcagcagggccggtgggaggcaggctctgcagtgaacgagggtgaggtgacctttggttcttgcagaaggatgtgattagcttgtttgaataatttcacggggtgggaggagtgaagccattaggttgaggagtgggtggcatgcagctggttcggccgatggggaactagctgggtggcatatctagtgacggcagatctcgtggtatctgaagaaaccctctctgagcaggcggcattgatagcatgggaaggttgggggagggaggaagggtttttcaggcggaggaatctgaaggtaaaggccttgcagtaggaatgggttagaaggtgggagctttctttatccccttcgtacagataaagaaatggaggcacagaaagtagaagtaacctgactacagtcctatagccaggaggcagggtttgaatacagaaactgttcctcaaaacagtcgatgcccccacatcatggtccaaaaaccacctaaatggggcacttaaaaagcatttcaaccaggctgagcagggcgggggtgcgtcctggaggaagtgatgcatgcgcagagcgctgggaggctggccggggagcaggtgaagggaggtgcggcctcctgaaagcagaggaggattgaagctgggaccgtgagcactcgtccagctggtgtcagatcccagtgggtgtgcatgtggcacgtgctgtcgggtgtgcggtggctgtacggttcctggacagggagcacttggaattgttaagactcgagtaggtagaatggatgcagtggctcacgcctgtaataccagcactttgggaggctgaggtgggaggatcatttgagcctaggagttcaagaccagcctgtgtaacatagcactgtatggctgtagtcccagctactcaggaggctgtggcgggaggatcacttgagcccagaagtttgaggctgtagtgagctatgatcatgttactgcactccagcctgggacttcctgtctcaggaagaaaaaaaaagaaaaagaaaaaagacttgagcaagtggagaagagaggtggctagtgtagacatggccagtttccatggggaagcgtggggaagggtgaaggtgtgaatggaggattaaggcatattgttaagtagtcttgatcacaagactaaagagttttgatttcattctttaggcgataggcagcctttgaagattttaaagcaggagagtaacatgagtaaaatagtgctttttgtttgttttattaaaagagtgcttgagcaatctgggtgttagataaacggagaggggagaggctggcagagatgctgaggcttggagctagggtgatagctgtgggaatcggaggaaagattccgaaaggagaactagcaagctttgctgggtgatcgactgactgaaaccagagaaggacaaatccatgattccaagattctaggaatctgggagaatggaggctctgctgaaggggcagggagtttgtggaggggacctggctttgtggagagttgatgaattcaggattaggctcctggattttgtggggttggtgacacgttggagtttgaaagtctaagcaggcaattaggaaaaaattggggaagggccagagccatttggaagagggggatgaattgagaaagtggagaggaggaaagcatagagggccaggagtcataacattcgcatttacagcagtaggagacgggagattgtcagagactccagagggactcaattctcttgacagccctcccatgagatgaattggataagtattgggaaggtattaactctctacacataaggtcgtgagtctcagagagatcaagagattgccccaagttcgctcagtgagggacggcaggagctgggactgtgacctttgtgctgacacccagcccaagactcttctccttacatctttgtcgcttttttttttttttccaggaactaagtggctcctccatggcccccatcatgaccacagtgcaatctaaaacagcccctcccacatttaacaggaccaataaattcacagctggcttccagaatattgttgatgcctatggtgtcggcagctaccgggagataaacccaggtaaagatctgatgaactgcacgactgggtagcttgaaagtgaaaactggtaagatggacccctgaggtgaccgaggtggtgaacttgttaaaactgtgaggcttggggctagggtagtagctgtgggaatcagaggaataagtaggatagtaggggcaagtagtaggattcctaaaatcctccttggtttcgtaataccctgtggtgtcgtctataaatgccgattggtgaaagaattgttctttgtcttcacctgtgcacccttaaactgcaacctcatcaggcagccgaagtcagtgttcatttccttcaccaatacaatgagggccatatcttggcatcttcacagtcctgtggttattgtgtgggaaagacaccagtacacagaacttagaagactcgattcttggtgtcctaagctgtggaatcttgctaccttggttaataaaataaaggtgtaggctgggtttggtggctcacgcctgtaatcccagcactttgggaggcagaggaggtggatcgcttgaggtcaggagttcgagaccagcttgaccaacatggcaaaaccctgtttctactaaaaatacaaaaattagtagggcatggtggcaggcagctgtaatcccagctactcaggaggcagaggcaggagaatcgcttgaatccaggaggcggagattgcagtgagctgagactgcaccactgcactccagccttggtgacagagcgagatcctgtctcaaaaaatagataaaataaaataaaatgaaaggatagaccagataccctttatccaagcagtgcatggtgattgttcttctccagcctgaggcccagtcgaatttgtggcctgtaatgcaggggcctcctgggttgagggtccctgcgagcaaactgctggtggtgtgtggtgcatgtgaatggtggagaaacagacaaaagatgggtgtggagaagagtatagaaagcacctagagagagaaagctgatcttgtgttccatcaaactttgtgatttttttttttttgactttgtgatttttgacaagtcacttagcttctctaagcctcagcacatctgtaaagtggggaataagaatgcctactcataggctgggcacagtggctcatgcccataatcccaacactttgggaggccgaggtgggaggattgcttgaaaccaggagttcgagaccagcccgggcaatatagcgagacctcatctctatagaaaattttaaaaagtagttaggcatggtggcacacatctgtagttccagctactcaagaggctgaggtgggaggatcacttgagcccaggaggtggaggttgcagtgagccatgattgtgccactgcactccagcctgggtgacagagcgagacccactttcaaaaaaaattgaaaaacagaatgcctaggaacagatgcactcatttatgtggcagctaagcatgtgtcagggtagggatggtgagaaaagacaaccagaaaggcttaaggaaacccgcatgcaaatcgtggagctgtggcagggaatctgaggtgggggccccgaggctgtgctgaggcctcaggcgttgtgtgtctcccctccgcagccccctacaccatcatcactttccccttcctgttcgctgtgatgtttggagactgtggtcatggaaccgtgatgctcctggctgcactttggatgattctgaatgagagacgcttgctctcccagaagacagacaatgaggtgagtgtccattgaccgtcttgccctgattcattttcagaatatgaaaatctgtatgtggttttcaccatagaaataacacatttttatgaaaaataaaggagagaaggaaagtaaaaaagagccaaattaacctaaaacttctggccaaaggtaattcctttggatggtttggtgccgttcctttcagcatttttgggtttttgttcatgacttgataaggcatcgatttttctttttcattatatattttttctaactctgatgtttttgcctgattatgaaagcaatacataatcactgtaaaaattagaaaaatgcaaccatctaatgaccgagagaaaaatcaccatgaatgcttttggatatctttccaatttgtttgtgcttatccaccaatttttcaaaaattggcatcaagtaatgcatactatttgtagtgtttttacttaaaatatcatgagtatttgttcatggcagaagcagcctgggacccgtgttcttctgaacactgagaaaccctgaacatcgtttccccactcttaagtttctccacctttgcagagtgctgtgaaggctgagacaactcaggagggtgcattggttcaaagtttattggctggccaggcacagtggctcacacctgtaaccccaccactttgggaggccatggtgggtgggtcatttgagatcaggggttcgaggccaacgtggccaacatggtgaaaccctgtctctactaaaaatacaaaaattagccaggcatggtggtgggcacctgtagtcccagctactcgggaggctgaggctggagaattacttgaacccgggaggtggaggttgcagtgagctgagattgcgccactttactccagcctgggtgacagagagggactccatcttaaaaaaaaaaaaaatatctgcaatgttttattacaggttgaattaattacagctaggtcagcgatgtcgaggttagtgagcagaatcaacctgtgaccaatatagttttccatgccaagcttaaagatatgattttgtatggtaaacattttgagtttcagagttacacgtcagcacttcttggaatgattgacacacattattcagtattatgagaaagcactttattcttctcagcagacatagtcagacagggaatcaactttacaatgacaagacgcaaaatgagtatatatctgacttgtcataaatatagcagccatgggaggccagttcagtgcttatttcctggaagcacctgagacaacagccacctgctttcaagtcccttcctaagcagatgaggccttgcttgcacttcagtttattttctaatgcaggtgcaatggaagaatctgaggcatgcatatatatataatatatattataaatatatattatgttataaatatatatattatttatatttataatatatattttatatatatatatatattttttttttttttttttttgagacagagtcttgctctgtcacccaggccggagggcagtggggcaatctcagctcactgcaacctccgcctcccgggttcaagtgattctcctgcctcagcctcctgagtaactgcgactaacgtgcataccaccacatctggctaattttagtagagacggggtttcaccatgttggtcaggctggtctcgaactcctgaccccaggtgatctgcccatgttggcctcccaaagtgttgggattacaggtgtgagccatcacacccggcctttttttttttttgagacacaggctggagcgcagtggtgcaatcttggctcactgcagcctccaactcccaggttcaagtgattctcctgcctcggcctcccaagtagctgggattacaggcatgcaccaccacgcccagctaatttttgcctatatggtttttgtttcatgataacaaataccagcctaggactttttggtgcacctatatgttccaaaaaccatgatgtgtgtgctcttcctgtctggatgattgatgtctgctgtggtcatgtggctcccccaagggtgcctgcaccggtgatgctggagatatcctgtagaacgcttccctctggggtctgcttcagagcccactgacaatcatcctctctgtctctctgaggccagatttggaacaccttcttccacgggcgctatctgatcctacttatgggcatcttctccatctacacgggtttgatctacaatgactgcttctccaagtccttgaacatctttggctcttcttggagtgtccaacccatgttcagaaacggcacatggaagtgagttgacagacagagatggtgtagtcgctggccatccaggtggcctcagtgactgttttcatggttgggggagtctacacctaggtctactcagaggtgcacttgaaaattcaaataggccaggctcagtggctcatgcctgtaatcccagtgctctgggaggctgaggcaggtggatcacctgaggttaggagttcgagaccagcctggccgacatggtgaaacctggtctccactaaaaatacaaaaattagccagatgtggtggcaggtgcctggaatctcagctactcgggaggctgaggcaggagaattgcttgagcctgggaggcggaggttgcagtgagctgagattgcgccactgcactccagcctgggtgacagagtgagactccatctccaaaaaaaaaagaaaaagaaaaaatagccaagtgtgttggcacgcctttagtcctagctacttgggaggctgaggcaggaggatggcttgggccaaggaggtcaaagctgcatgagctacaatcacaccattgcactccagcctgggcaacacagcaagatgctgtctcaaaagcaaatgagaggctgggcacggtggcttacgcctgtaatctcaacactttgggaggccgaggcgggaggatcacttgagttcaggagttcgagaccagcctggccaacatggtgaaaccccatctctgctaaaaatacaaaaattagctgggcatggtggcacatgcctgtaatcccagctactaaggaggccaaggcacgagaactgcttgaatccaggaggtggaggttgcagcgagccgagatcacaccattgcactccagcctgggcaacagagcaagactccaactgaaaaaaaaaaaaaaaaagcagatgaggaaatggttggttttgtaatgctgtctccctgtatttgtcctgtggctgacagagttgggggcaggggacacctggtaaggatatgtgggtactgtagaatagagagacctggaagctctctaaatccccacagtccacccttcccctatgcattctacagtgattttatgcagttaatcagacaagcagacttcagaatggaaacataaccttttaggaatggagacttttatggggagaaagattttagagtttgagaggtaggtccatttaatgaactgggggagaacaggggactctggaggagaggggactgtgaagtgaacaaatagaaattgcgacagcctcttgattttgggggtgatcttaggctacgtgcatcacgtacctgagattcccacagtagcgtgagggctaatttgtaaaacctacatatcaatggtgacgtttcctaacatctgtctctgcccatctcctttgggtcagcttaagatttccctgtctcattctggaactttcctttgaacaaatgagaaaagaggaccaaagtgaagactgagctaggtaaacatgttcacaatctcttttcccattcttcctctcccaaggaagggacttcacgggtcttactggctcaccaaaatctgtggtgaacgtcataaatgggggacagaatgaacaatcaatttcatccaagagtttttcagttagaaaagattcaatcctgggtttatttattttttttctttttctttttctttttttttttttgagatggagtcttgctctgtcacccaggctagagtacagtggcacaatctcagctcactgcaacctccacctcccgggttcaagcgattctcctgcctcagcctcctgagtagctgggactacaggcacacaccaccacacccagctaagttttgtatttttaggagaggtggggtttcaccatgttggccaggctggtctcaaactcctggcctgaattgatccacctgcctcagcctcccaaagtgctaggattacaggcatgagccacacgcccggcccaatcctgggtttcttttgacaaagctttcctgagggcattcaaagggcttgatgttggcacagagaggctccaagagactgtagaaatatttagtgtggggcaaggagattctaacgcagtctcttcttgtttctctgctaggcctaagttccctgaagtagagatgggattccccaccttaaatatagaaaaacaaaaatatagaaaaatgaaggataaaacgttttctggaatgacatacagacagctatatctgtgatttttttttttttttgctttgcaattagtattctaaagagatgcccaaaagaacaaaactttcataaatttaaaaacaaattaggttgagcacggtggctcacacctgtgatcccagaactttgggaggccaaagtgggaggattgcttgagcccaggaattcaagaccagcctgggcaatatagggagaccctgtctctacataaaatgaaaaaaaaaaaaaaaattagctgggcagtggcacatgcctgtgcttccagctacttgggaggctgagacaggaagatcatttgagcctgggaggttgaggctgcaatgaaccgtgatggcactgttgcaccccagccttggcaatagagcaagaccccgtctcaaacaaacaaacaaacaaacaaacacattcattcttacacttagttctgctctttagatttaaactcataagtatagagatgagttttatttttttatttatttattttttattttgaggtggagtctcgttctgtggcccaagctggagtgcaatggtgcgattttggctcactgcaacgtctgcctcccgggttctagcgattctcctgcctcagcctcccaagtagctgggattacaggcgtgtgccactacacccagtgaatttttatatttttagtagagacggggtttcaccatgttggccaggctggtcttgaactcctgacctcaggtgatccacctgcctcggcctcccaaagtgatgggattacaggtgtgagccaccgtgcccggccgagatgagttttgaaacttgttcaatctgcataatttcgccagcctaccaacatgaaattccatttcccatagagtatgattgtgaaaggcccgaattaactgtcttgttaccactctgcagacatgggtatgaatgctgttctcttatgcacctgcaaatgtcttcttccccaattcaagactctttggtcttgaattggagcaatgctcagccatatgtgaagggtcaggagtataaggcagaacctcattatcactgtggcagaagaaaacgacagctgaagtacacagtgagctgattctggtcaccagctgcgacctgggtcttggacctgcttccttgatggttgaaagaccactgaaaacattcctgtagtcactggagttgggcgtattgactcaacaagggaaatggtgcatcattgggaaaaccatctctattaagagggtattagaaagggcttagaggatttagcctttgttaggaggcggggatgttgggtcatttttgtggtttggaccgtgtccttctttttgcctgtatcgaggtatgattgtggaatgatcttgttttttctcactctatcatagtcgccaggtggccttgcctgatgttgctgttctatgaagttgcttatgctcagcaggagacacgatggcttagctatgggtgccaggccagttccttcctgtcaggggtgacttttccctttatgaacacacaaacacttctctgctatggaaatccagccatttgcactgagtcatgccattaggatgggggtcacgtctgggcaagcgagtcacggtcagctgctgccactgcacattgagggccaggacagtaggccaggcttcccgattccctcagctgctacctaaggccctcagcacctcactgcagaagggagggagtgtatttctgggcagcctgtcaagactgtctgctgtctgctcttcacatttcattattttttaatttaatttaatttattttttgtagacggagtcttgctctgttgcccaggctggagtgcagtggtgcaatcttggctcactgcaacctccgcctcctggtttcaagtaattcttctgccacagcctcctgagtagctgggattacagtcatgtgtgcaccacgcccaactaattttttgtatttttatgtagagatggggtttcaccattgttggccaggctggtcttgaactcctgacctcaagtgattcacccacctcagcctcccaaagtgctgggattacaagcatgagccaccgtaccaggcctgtacctcatcatttcaaatgctcattccttgggcccttccacagatgcagttcttaaaaaaaaatcaactcaacattctcatccccttaaggcttgcagagacagagtaagaaatttctgggccgggcatcgtggctcacaccaaatcccagcactttgggaggccgaggcaggcggatcacttgaggtcaggagttcgagaccagcctgaccaacatggtgaaaccccatctctactaaaaatacaaaaattagtcgggcatggtgccacatgcctgtaatcccagctgctcgggagcctgaggcaggagaattgcttgaacctggggttggggggtgggggtggcggaggttgcagtgagccaagatcgtgccattgcactctagcctgggcaacaagaatgaaacgcagtctccaaaaaaaaaaaaaaaaaagaaatttcttcccattgacatccattcttctgggtgaaaaggggacacagatttaaagacatacaatgggctacatgtttttagagttaagtttcatagcagttgaggtgtatatgtgaaaaaacaatccatccttcagaagcagccccagtgttccctggggagacttcccaagcatgtccctgggctggggtttctttcctgtgtgctcccagcatccctgctttctacctcatttctgatgtggtacaaatcctgatctcccttccttttccttccctttccccttctgtcccctctcccccttctcccttttttttttttttcctttcaacagagtctcactctgttgcccaggctggagtgcagtggtacaatcatggctcactgcagccttgacctcccaggctcaaggcagtcctcctgcctcagcctcccaagtagctggaactaaaggcatgtgccaccacaaccagctggtctcaaactcctggacttaagggatcctcccacctcaggctcccaaagtgctgggattatgaatgtaagccactgctcccggccctgagtttctttactatagcacatcaggctgagatctctttgcaaactcagattgtagcctcagtgtttaggacaatacttgatgtgtagtagatattgaaccaaccaaagtgatgaattgcaccagtagttggactttgatgggcaagttcgtgactggtggtattatagtatcttttctgccccggttgatcattgtttgtttttctccttttctccctctaaagtactcatgtaatggaggaaagtctatatctgcagctggacccagccataccaggagtgtattttggaaatccatacccgtttgggattgatccggtaataatgtcttcttgggttaaatatttcttatgtgaactatcttgaggagacctctggagagagaagaaaaggccaacaaagcctgtcaaatcaacaaacttgtgttgagataaaataacttctgctgacgtttttgtgacacatagagccagagtcaagtaaaagttctgtctacaccttctacccagccccattttccatacagtcccccaaacgtctgcctctttctccatcaatcatatccctggtggttaataactgcttctttaaaaggcacttggttgcctggggagtatgcatattacatgagctatttagcgtcctaatcaagtttaagttccctgctttgtattttcttgcagtgggaaacatttcccttttttctaaaaaagtgtggatttacttttatgtttgctttgttttactgcatagaattgacgctttttaaaaaaggtatttgcttcattttatgtttgttatatctatctcagtcagctagatttgagctaagcaaaacgatacttcctcgcagcctgtagatataaagcggttttgaggagatacaacacatgcccgttcatgtaaagctgttcatttctattggcccagtgcatgctgccaccaggtggcggccttgtgctccaaatgagcgtgagtagtctgaaattgaacctggcaaatgctgtccatgtttcttctaagctctttctttatgggagagaacctgagacctccgttttcgttgctgacaattaggagtaaatagtactagccctaaaactggtttccagtctctcccatcttacaggtcacctcctcttaagttttcctgtgtcattccgctatcgcccgcctccctgcccttataaaaacatgaattttgcccaggatttgtttatacttgccacccagggacacttgcattctaagttttatcaaaagtggtaaagtccttgaaggctggtgtgtaagttgcaaagtgctaaaaactaatttgaatttttgtggcctgcaagacgttgtccttggtcaaaggaatttcatgtttagtaagcaggtggagaaggaatctagacggggatgatcttagggtctggttgatcttcctttgtttggaatctcattgctccaatggtctcgtctctcccctccacagcccacagttaattcatcagcaaatcctgcctgtccatttctgctcctcagacagagtggagctacggtatttcacattgcagaactgagtgatcctgagtttctactctgatgcaattttgtcatctgcccacaagttagaaaagaaagaaaatatgtcagggtgaaagagaatgtgggatattgaaaataatgaaatctgttcctagtaacatttagaattttgaaaatttctggtctttctatcctaaaataatacatatatatgatttaaaaaaatctataccacacaaaatattatataaagaaaagcaggagttggccagatgtggtggctcatgcctgtaatcccagcactttgggaggttgaggcgggtggatcacttgaggtcaggagttcgagaccagcctggccaacatggtgaaaccttgtctccactaaaaatacagaaattagctgggcatggtggcacacaccagtagtcccagctacttgggaggctgaggcaggagaattgctttaacctgggaggtggaggttgcagtgagctgagatcatgccactgcactccagcctaggcaaccagagtgagagcccatctcaaaaaaaaaaaaaaagtaaaaataccaaaattagccaggcatggtagcatatgcttgtgatcccagctactcgggaggctgaggcaggagaagtacttgaatctgggaagcagaggttgcagtaagctgagatcacaccactgcactccagcttgggtgatacagagagactcttctcaaaaaaaaaaaaaaaaaaaaagaaaaagaaaagcgggagttgcctttcctacctctccagttcctgcagtcctgttcctcagagataaccactttaacagaacacgtctgtattagtcccttttcatgctggtgataaagacatccctgagactgggtaatttataaagaaaaagattgtgtggggaggccacacaatgatggtggaaagtgaaaggcacatcttacatggcggcaggcaagagagagaatgagagccaggtgaaaggggtttccccttataaaaccatcagatctcatgagacttatgcactcccatgagaacagtatggaggaaaccacccccatgattcaatgatctcccaccagcttcctcccacagcacgtggaaattatgggaatacaattcaagatgaaatttgggtgggacacaaccaaaccatatcaatgtctgtgcctatgttagtttgtatcatatatatatattaataagggcttactttttacataacacaaatttctacagtgcatttactgactgcgtttggcatctatttgtgaatcaaatcacaaaatatttggccttcatcatagcctgggctcttaacgcaggaatcagattgcctgtgtttaaatctttgcttttctatttacttgctctgtgagtttgagcacgttaacatctctatgtctgtttcttcacctataaaacgcatataataacagccctaggccgggcgcgatggctcacacctgtaatcccagcactttgggaggccaaggcatgcggatcatttgaggtcaggagtttgacaccagcctggccaacatggtgaaaccccatctctactaaaaatacaaaattagctgggcatagtggtgggtgcctgtaatcccagctacttgggaggctgaggcaggagaatcgcttgaacccgggaggcagaggttgtagtgagccgagattgcaccattgcaccccagcctgagcaacagagcgagactctgtctcaaaaaaataaaaataaaaataaaaaaaacagcagccctaactcctaggattgcttggcaaatgaaattatgtttacatgtaaaactgccagaacagagtcttatgcacaaacgtggtaaatgctccttgaatattagttcctcttatgttatttcttcctaggtatgtaagtaacttaatcttcctgaggttatgataaattaccttatctgtaaaatgagaataactatatctcatagagttttcagtagaactaaatgagataaacacatctaaattgcttagtatgtacttggtacttaactattaacattttaaaattttctttttatttatttatttatttagagacagagtcttgctctcttgcccaggctgtaatgtagtggcatgatcatggctcaatgcagcctcgacctcctgggcctcaatctccctgcttcagccttccaagcagctgggactacaggcacgtgccatgccatgctgggctaatttttgtttgtttgtttgtttgttttgagatggagtttcacttttgttgcccaggctggagtgcaattgtgcgatctcggctcgccacagcctccacctcctgggttcaagtgattcttctgcctctgcctcctgagtagctgggattacaggcataagccaccatgccatgctgggctaattttttaaaaaagcttttgtagagacggggtctcactttgttaccagcctcccaaaatggtaggattacaagcgtgagccactgcacctggccaacatttttaatgtgtcagatttggctgggtctaaagtgtactagcagacccgccctcactgcattgagtgtgcctgtgggaactgtccaaacaggtgagcaaggggaatgccgagggctggggcaggcttggtgccacttagatgccaaagcccatgtgagggtagaggaggcatctctggggtctgggcacctgttattgaagtcccttctccccgcttcccagcagccggctcctcagtgggtgcccctctggcctggctcaggacattgcaaaggaaggatcagtgcaaattagcacctgactgtgtgagcacgtgtgtgtgtgtgatggagggagcgagatgattgtgtctgaggttgtgtctggttggatgttggccccttaacagaagcaaagaagtttggaggaggaagtcatttagcagaaaaggtgagaaagccattgtgcccttgtcgcctttgacatgtcccagagcaaacctgaaaacaatttgggatgtacctcaagtacaggtggggacaggggaaggagcaaggacttggaatcctttccacagagtgggagtggagaccatggggctgccgagatttaaatggggaagatgaatattagtgactctggtccttagctagtgtgagaccctaactaacccctccacccaccagccccctgcacgaccacccagtgtgcttttcctcatgtcagtatcatcgatatcatttggggcaggacaggtacacatgatccccacctggcagtgctgtttaaaatgggccatgtagaaggcagggactgtgtcttacgcatcgtgcttgcaaagattggctacaggaacggcttcttgagaaaggtctggggaaatgctttgtaatgcgaagcactacagactttcagagtaagaggtggtgttattaaaaaggattggatacattcatgggccaatgagctataggccatgattaaggaaactgaggcaagtttgagatcttgccgtaatggctcagattagctttcctcttttttttttttttttttttttgagacagagtcttgctctttcgcccaggctggagtacaatggtgcgatctcagctcactgcaacctccaccttccaggttcaagcggttctcctgcctcagcctcctgagtagttgggattacaggcacccgccaccatgcccagctaatttttgtattttggtgtagagacagggtttcgccaggttgaccagactggtctcgaactcctgagctcaagtgatacacctgcctcggcctcccagattatcttttcacgtaggatttttctcccctgtttccttccagcaatttgataatagcactaatgatcctgttacttttgtcattaaagttgcatttataaagggtttcatccttttttcctttttggactctaaaatgtatgcattgagctggactgaaatatgaaagtgcagttcccagagcggtttgcttagggaaagttgtgctgtagccctcaactccagtagaacttctaagactctctctcacttggttttttgtcccatttcccatccagatttggaacttggcttcaaacaaactcacatttctgaactcgtataaaatgaagatgtcggtgatcctgggaattgtccagatggttttcggtgtcatcctcagccttttcaatcacatgtaagtttcttgatgcactctctgcctgctctgtctgatcacactgatgatgaatggtgacagagccactggtttgggaactgcatctctctgtgcaagttttcttcctatgaggggtacttccctgggcatctgggcttgagccaagacaagctggttggctggaaatggcagcacctccgtttctcctgagcagagtctctccaaggtaagtgctcctctggccccagaaatatttgagggttcaaaaaaagactggaggccaggtgcggtgtctcacacctgtaatcccagcgctttggaaggccgacaggtggatcacctgaggtcaggagttcaagaccagcctggccaacatggtgaaagcccatctctactaaaaatacaaaaattagccaggcatggtgtcgggcacctgtaatcccagctacttaggaggctggggcaggggaatcccttggacctggaggcagaggtggcagtgagccaagattgtatcgctgcactccagcctgggtgacagagtaagactccatctcaaaaaaaaaaaaaaaaaaaaaaaaagagaaaccattcttaacttccaggctgtacagaatcagatgatagtctccattggcctgtgggccacactttgcagacccctatcttagagcattcttaggaaaaagcttccaggtccccattatatatcctcttgcctttaaatgtgcaactctgagctaggtctgcatgcgaagctgtagtcagatcaccaccctctctgtgtgggcatgacctttgctttagacgttacttctagaccgtggttctctctgactcttttgtgcaaaagcactttccagtatttcctttcaattttcttttctatgcatccatacaggattgctgtttgctgggggggtggggggtgccgttgtttgccagtagtgcaaaaaaaaaaaagatagaacattttgtgcttttgtgctttgagagaataattaagtcctaacgttcccttgatgttctatcttgtgtatgtgtgtgtcttccacccccagatacttcagaagaactctcaacatcattctgcaatttatccctgagatgatttttatcctgtgtctgtttggatacctggttttcatgatcattttcaaatggtgctgctttgacgtccatgtatctcagcacgcccccagcatcctcatccacttcatcaacatgtttctgtttaactacagtgactcttccaacgcacccctctacaaacatcaggtatttctgctatttttttttttttactcttcttttatttacttgattatgtcaaatttctctcctactctttttttttttttgagaaagagtcttgctctgtcacccaggctggagtgcagtggcgtgatcttgactcactgcaacctccacctcctgggttaaaacgattttcctgactcagcctcctgagtggctgggactacaggtgcacgccaccacgcctggctaatttttgtatttttagtagagacaggatttcaccatgttggccaggctgctctcgaactcatgacctcaagcaatctacctgctttggcctcgcaaaatgctgggattacaggtgtgagccaccgcacctggcctctctcctactcttgagtgttgcaaagagtagttatttgtaaaactgagccatcttggcatccagtggagggtgttacatcctttacatctcaaaagtgtcttattaaatgaaggtgcaagcactgagggctatagtgtggctccaaccattcttgttggggtaatacatgaaagggataattgcagagggattgaagattgtcttgtacattggctatgaagaaagaaaaaaaaataacccttcaaattgttaggcttgcagctgtagaatgttctatatggcaccttaatacttaataatcttttattcaaagagtgaactctagctaaattaacaagaataataattgaaatagaatcagaagacaaagccctgtattcacatgggcagacagtttctggaaaagcacgaatcaaactcatgctcttctgtgagcttccaaagctggcgggagctgctgttttcattttttgctcctcttccagagacagttcatcccaacagttgcactttattgccactctgatttcttccatttcttttagcctcattatcaacttaatattttatttatttatttatttatttatttatttatttatttatttatttttatttttggagatggagtcccactctgtcacccaggctggagtgcagtggcacgatcttggctcattgcgacctccgcctcctgggttcaagtgattctcctgcctcagcctcccaaggagctgggattacaagcacctgccaccaggcctggctaatttttgcatttttagtagagacggggtttcaccatgttggtcaggctggtcttgaactcctaaccacaggtaatccatccacctcagactcccaaagtgctgggattacaggtgtgaaccaccacacctggccaatattttatttttaaaaggtatacaaatcctattggggctggatataaaaataactcagtgagtaattctttgatgacacaaataacagtagctttttccccctggcctctcccagtgattaacctgatcatattatctgagggtagattttcactaaaaaagacccatttctataggtcctgattcctctggatgaagccctgtgactagttccacaaggccagctgcccttcagtgcagaggttgtctgttggggattgcacccatcagatgtcgtagttaatgtcatgcttctacggccatgccccttctcatgagttcagttcctagttgtgttctctttccctacccaagcatcaataagaaaaagaaaaggctgggcgtagtggctcacgcctgtaatcccatcactttgggaggccaaggcaggcagatcacctgaagtcaggagttcgagaccagcctgcccaacatggtgaaacaccatctctactaaaaatacaaaaaattagctgggcatggtggcaggtgcctataatcccagctactcaggagactgaggcaggagaattgcttgaacctgagaggcagaggttgcagtgagccaagattgcgccactgcactccagcctggacaacaagagcaaaactctgtctcaaaaaaaaaaataaaaaaagaagaagaagaagaaaaaatgccttgtaatcaggttttcataaggagtgagtgtagataagaatcagaaacaggtgcattactgttgggcaccattttgttatcacagatggtaaccatgagccatccccagaatgttgacatgaactgaacgtattttgaaggttcatttactcagtgctggatctaaacaaacatttatttggatttcccaaataactcttctgttttaaggcagagaactcagattcaccaaaatagttcgtgtgctaactgctttcattaagactgaagtcctcacttagtctggaataagcactgagcattgcacagtgaatgcgtggcttatccaactttttttccattcaaaagcattatttggagttggttggttttcacacaccctagtgtgaagattaattgtcttgatacagtttgaagttttcataacctcatttcggggttatgcagctggaagaggcaatacaagttaataaagtcccttcccaacattgtcctggctgtctttgaatatcaaaggatagccacacacacacacacacacacacacacacacacacacacacacactcatcccgttgctttgtacgtcatcgggggaaaatcctgttgcataaaaatggacaaagggccatgagacagcattgtgtgcgggtactaggatggataagttcagcttgggttcacatggtctcccttcctcttttggacatttaaaagtagagtgaggccaggcgcggcggctcatgcctgtaaccccagcactttgggaggccgaggcgggcggatcacgaggtcaggagatcgagaccatcctggctaacacggtgaaaccccgtcccgactaaaaatacaaaaaaattagccgggtgtggtggcacatgccggttgtcccagctacttgggaggctgaggcaagcaactcgcttgaacccaggaggcagaggttgcagtgagccaagatggcgccactgcactccagcctaggcaacagagcgagactccatctcaaaaaaaaaagttgagtgaggatggaagatggaaccgataaagtgttcactctattatcagggggaatcttgttacaattgggataataaattgtctcctggcatttactgcgaccttggtcagaatgcttggagaaacgtgaaggctcaagaaatgtttttctatttccttccagcaccgtgctctcaatccttctcagcagccctgaccgagccttccgaggctggctggttcttttgaccatagcagctatgagtcactcctctaaactggtcactggggtgtgtataagaaaggaggcaggggcgtgaggatgtgaaaggtgatctggagcaggaatataacagggactcctccagggtttcagcagaggcctgaagaccgcagctgcctcactccaaagggaaggcgagagagaccgagagtgagttcaaagtgggtaacccagagcctgttgagtaaattgcccacatggaagggatgaaagtcaggtagcgatggtgaggaacttcttttttcttttttaagagataggagcaagagagctcagataattttctaggactcaaaatataaaattaccggttgaatactgtttgtgacttaaagtgacccaaggacttttgagtaccaccgagtgactggtaaagtcatgaggcctgccatagttttcatgcaggcccaggtgaaaacgacccccatgggacagagttcaagacaaggggtgcctttataatgtttcatgcgtacttcttgtttaaaagattggttacgtatggtacaagggactactcagaataaggaatacagagagtttccagtgtctaccccgtgtcgaacatttggaaacactggacagatatttctctatctgcaaggggaatattccaggcgtgaaggtgaatggattcattgaaatgctttagatctctcaaaataaagtgctagtgaagtggcccatagtggtcattttcatcacgtaaagtgtgctgttctgccatgtgaaaatgatgagatctcgccattttggtcttgcagcaagaagtccaaagtttctttgtggttatggctttgatttctgtgccgtggatgcttctgattaagccgtttattcttagagccagtcatcggaaatcccaggtaagggctgtttgtttcagttcaccctactttgcataagaatgtgggtttctggaaagatgaatcttgggtttagagagaatcgtcctgggctgccagggccagaagaatggtgttgaggaactgacccgccctgagtatgtttcgttctgtggagctagacttttccactgggccgtcttatttccaacgagatgctctattaagggcaaacacgtttaagccttatgtctcggctggtcgcagtagcccacgcctgtaatcctagcactttgggaggccgaggcgggtggatcacctgaggtcgggagtttgagaccagcctggctaacgtggcgaaaccccatctctactaaaaacaccaaaattagccaggcatggtgatgggtacctgtaatcccaactacttgggaggctgaggcaggagaatcacttgagcccagggtggtgggggagattgcggtgagccgagatcacacttcactctagcctgggcgaaagggcgaaaaaccgtctcaaaaaataaaataaaataaaataaaccttatgtctgacagactttgttcagggtgtatgtgtgctgagtctcgtggtagttaatgatttataagggtctgaatgtggttgttttattagttataaataatattttattatgattttacttttaaaacaaatattaaaagcttttttcattaatattctaaagttgtgagactttactgtattatgttacagattgtgtcagggaattagaagagtaaacaaattcaattaggtcagtttttgtttgtttgtgatttttcccctgttgccaaataccaggttcagcccactttctctttttgtctaaactgcccctgagccttagatgtactaggggggtgaagcagagtttaatatcagcctgaaccaaataggatttagtaagattaaccttccagaggacatcagcgtctagctctgacacacagacggtttgagatggtcgttctctgctttcctctattagtgcaaaagattaagcggaatgtgctgagaccgtgtatgttttaaatggttgtagatatgttcagattaaattctatttttctgagatctttgttggatattgacctggacaggcagcagagtcagggacctagacatgacgagacttgagttcaggaagtttgtccctatgtgacgctctgtttctctgtcacctgcctctcctcccactgtctccttatgccagtccgaactcgttccaaagcttagctgaaacgtaatctatatgaggtattcataaagaggaagacaaagcaaggaagacttggttattgtttggttaactggtgggagagcaaggtggttgagggttgttgaggtgggtgcttgtccagacaggtgaccaagtatttcaaagagggtggcaaatacctgtttggagaagtagatgcaagttttttttgttttgttttgttttctagagacaaggtctctctctgtctctgaggccagagtgcagtggctattcaccagcacaatcatagctcactgcagcctccgactcccgggctcaagccatcctcttgcctcagcctcccaagtaacaggcatgcccccctgcctggctcagcatttttttttttttttttttttttttgagatgagctctcactatgctgcccaggctgctctcaaactcatggcctcaagtgattgtaattttttttttctaggaactaaatctgtccataagccaagagccaggttactgcaggctctcctgagttccaggactgtaaaataatagcttgtcttgctctttgtaccacacaagctctttaaatagttgctgatctcaaagtggtagatttctcctttgcgccaccagatgacttaaatagagggaaggagggagagagggttttcctagtctgccttcatggatgatagctctgaaactgactggtaacaggagctcctgaagacggcgtggaggcctgttcccttggcccttgggatgcacggctgttggttgtttcctcaggcggctgcttagggtccttttcgtgtcggaaacattaccacctccgttcaagagatggtcctataatggcattatttgccccttctccacctctccttcatgaaatcctacagacctaatacataaacaatttgttctgacggacttcaggtgatatgaacaggggtcctgtctattagcctctcctacaacctgggtccctgcagaatgtggcctgggaacctctccactagagggccgcctgtggcgtggccctggtgacatgccccgtgggcagcgagtgagtacacatctccttccgagagcccttgtggccagccaccaggccccccacgttctgtttccccttctgacttgctgctatgaacccaggtccccccatactcccacatctcaggtcacagtgaaataactgtgtgtttctatttaaaatcttcggccgggcacggtggctcacgcctgtaatcccagcactttgggaggccgaggcgggcggatcacaaggtcaggagatcgagaccatcctggctaacacggtgaaaccccgtctctactaaaaatacaaaaaattagccgggcgtggtggcgggcgcctgtagtcccagctactcgggaggctgaggcaggagaatggcctgagcccgggaggcggagcttgcagtgagccgaaattgcaccactgcactccagcccaggcgacagaacgagactctgtctcaaaaaataaataaataaataaataaacttcatttcaacatgtgcgttttttatggttaatgttattgaaacatataacatacagacaagtgcatgaataacgaggcaccaatccatgaagtatcgcagcatgaacacgttcgtgtcaccagcacttaaatcgagaaatgggtcatccttagaacttgagagtcctgaccgggcacagtggctcatgcctgtaatcccagcactctgggaggctgaggcaggtggattgcctgaggtcaggagttcgagaccagcctggccaacatggtgaaaccctgtctctactaaaaatacaaaaattagccggcgtggtggtgagtgccttataatcccagctactcggaaggctgaagcaggagaattgcttgaacctgagaggtggagatggcagtgagctgagatcgccgccattgcactccagcctgggcgacataagcgagactccgtctcaaaaaaaaaaaaagttttttttgccttcttcctgtcactcttaccccaagagcaaacattgtgctgacctccaggactgtcagttcgttttgcctgttcttgaactgtatttaaatgaaatcatccagaatgtcttctttgggatctatcttctctcatccaacattgcagtgttagtaattacaaatggtgatactataaacatccttgtatatatcttttggcacatgggtttgaatttttatttattttatgtatgtatttttagatagggtcttgctctgttgcccagattggagtgcagtggtgggatcatagctgactcacctcctgggctcaggcaatcctcccacctcagcctcctgagtagctgggactgcaggcctgcaccacaatgcccagctattttttaatttttttggtagagatgaggtcttgctatgttgcccaagctggtcttgaactcctgagatcaagtgatcctcctgcctttgcctcccaaagcactgggattgtaagtgtgagccactgtgcccagccacatgtgtttttagaaagttgccagtagctaatttacaatgattgctatatgttttatttcatacgccacccagcttaagcattgtgcgattttagtaagaggactgcaagtaagtatctggaaggaagatagtcactaggattcacaagtccagtatcacacttctacaaaattattcatgttcattttaactaattcaagaataatgagcagaaaagggtagagtttagggttggaaatggagaaaccgtaatatatctctcctttgatattttcttctataagttgaaggagagagaaaataggatttcgagatgacaaatataaagttaacttgagccacgtccctccccatgggataaagaaccacaaggtgttggggacagcctaacctagaagctggctcttggcacctggcaccctggactcttgtctagatggacctgagcccacttctgggtcctacagaggccttgttcctcagtctcctgagggcagaccaggccactggcatggacaccacgagtccctgggtggccaaggggcagctgtctgtagggaatgcgagcagaacttagacattttgggtcagggtgtctgtgtgcacatacaaggccctcatgatataggatgaagccagaggtgaaaaaaagagggctccctggtccagggccagctcccatgctgccatggcatggcgtgaattctgaatttcaacatagccttcccagtttttacaaagatttattttttaagctagaacccctatacacacactttttttttttttttttttttgaggcagagtcttgcttggtcacccaggctggagtgcagtggcgcaaacactgctcacttcagcctcaacatcccaggctcaagagatcctcctgtcctagcctcctatgtagttgggacaggtgctccctcagccaggctaaattttttttttttttttttttgagagatgggatctcactttgttgcccaggctgaccttgaactcctaggctcaaacatgaaacatattttatttaggaatttgttggcttgatgtataacttttaaatatttcaacctatggcatgtgaactactgtctttgctcttgcccagagccctgcaaatgttaagtgcagacctgctaaagaaaggagggccctggctgggtgtggtggctcacgcctgtaatcgtagcactttgggaggccgaggcaggtggatcacctgaggtcaggagttcgagatcaccctggccagcatggagaaaccccgtctctattaaaaatacaaaaattagctgggcgtggtggtgggtgcttataatcctgggtactcaggagagctgaggctggagaatctcttgaactgggggacagaggttgcagtgaaccgagattgtaccacttcactccagcctgggcgaaggagcaaaattccttctcaaaaaaaaaaaaaaaaaaaagaaaagaaagaagggtccagatacgttgatgcctaatttgcaatacccctcccatgaaatcattctagaaaaactttggacatgggacattaagcttcatggtgacttgaaagaaatataccattcacacttaggggtaaaaccagaccaagttgaatggtgactatgcctagatttttttttccttgaatttttcctaagctatttttatagttaatttcacaaggctacatggaaggtacgactgatgatttatgaccatgtgtatttcttttaacaatggaaaggcacttttgtacttgcattgctttagtgtcaagactataatttggcacattctggagcattgtggagaaaaagcacatgcactggagtcaggcaactgagtttgaattatggctctgccacttaccagccttgccagctgtatgatcttgggcacatatttttctttttttttttttttttgagacagtctcactctgtcccccaggctggagtgcagtggcacaatcttggctcactgcaacctctgcctcccagattcaagcaattctccttcctcagcctcccgagtagctgggattacaggcatgtgctaccatgcccaactaatttttgtatttttatggagatggaatctcgctatgttgaccaggctggtcttgaactcttggcctcaggcaatcctctcaacttggcctcccacagcactgggattataggcatgagccactgtgcctggcctttaacttttttttttttttttttttttttttgagatggagtctcactctgtcgcccaggctggagtgcagtggcgtgatcttggctcaccgcagcctccacctcctgagttccaatgactctcctgcctcagcctcccgggtagctgggattacaggcatgcaccaccacgcccagctattttttgtatttttaatagagacggggtgccaggctggtctcgaactcctgaccccaggtgagccacggtgcctggcctaatttttgtatttttagtagagatgggttttcaccatgttggccacgctagtcttggactcctgacctcaagtgatctgccagcctccgcctcccgaaatgctgggattacaggcgtgagtcaccacacgcagctgggcacatttcttttctttttttatttttattttattttatttatttatttttttgagacggagtctctctctgtcgcccaggctagagtgtagtggcacaatgtccgctcactacaagctgtgcctcccgggcacatttcttaacctttctgtgctgcagcttacttctctagaaaatagggtgataattgtgcttatataaaatggttgttgtgagggcttaatgagatagtgtagtgtttagaacagtgtctggtacataggtagtatttgaggagagcctttatttatatttatatgtgttagaattctcagggtgagttgagcgcattcctcatttccctgcttgttgtcagctgcaggcatccaggatccaagaagatgccactgagaacattgaaggtgatagctccagcccttctagccgttctggccagaggacttctgcagatacccacggggctctggacgaccatggagaagaggtatctgggacgagagcccctgaggaagactccccagtttgtacaaattctagaatggacataggcagtagagctgggtgggtctggagggccccacggggcagtagccctgtcactgctgagtcctgggaagctgtgaaggtctcagggaaggggacctactagctagtctaagaggatcagaacagctatttagcaaccaatctgggcacattttaatatttctagtccaagtaccgctgcatctgtatgtgtcaggtgaatatcagcctcggatctagtgacatagaaggtcctgcgtgtcactgaggactccttggctcagcaccacgcccctataagctctcttttttgtttgtttttgagatagagtctcactctgttgcccaggctggagtgagccaatttcggctcactgcaacctccgcctcccaggctcaagtgattctcctgcctcagcctctctaatacctgggattataggcatccgccactgcacccggttaatttttgtgtttttagtagagatggggcttcaccatgttggccaggctgatcttgaactcctgacctcaggtgatctgcctgcctcggcctcccaaagtgctgggattacaggcatgagccaccgtgcctggccccctatgatctctttataatgttatctgcctctcatgtgaattcataaattgttttgttccctcatccctccctgcccctgcctgtgcaaggacagccactgcccctcaggagcccgtgccacatcctcccagatgaaagcagctgtctgttccatgtgttgactgaagtcagccacatttgtgaatcccaagctggaggctttaaccggagctctgttctaatttgggagtgggaactgggtttccatgagggccacagatgctataaatggctccatttgtggtgttaattgcttattttaaaaagttttctcttgatagccatgtgtggtggctcatacctgtaatcccagcactttgggaggccaaggcgggcggatcacttgaggttaggagtccaacaccagcctggtcaacatggtgaaaccctgtctctactaaatatacaaaaattagccaggcatggtggtgagcacctataatcccagctactggggaggctgaggcaggagaatcacttgaacctgggaggcagaggttgcaatgagctgagatcatgccactgtactcccagcctgggcgacagagcaagactgtctggaaaaaaaaaaaattatcttgattaattagaattaatgaaaaatctcaatcgtgaaaattcttcccaagaaaattctaggtacagagtgatccacagtagtggctgttgacattaccaagtctgtcagacttgctggaatgttttagaatccaacccacgcatgttctgactcctcaagtcctggcctgtccagggcaacctccctcatctcttctcctcctgccctcaatctatatccagacaatttccacctgccacctccaacatgagcaggctgcccttgcttgggcaactttagtcaccattcatggacctctttcccccaggtctaatcatacatgggtctcccgtctccaggcaaatgtgtgcctccccctgtttctctttcaagttccttgcttgcttctctccacggtagggttagccaaactcaaggttaagggtgcagtccttgactgtcacatctgcccaagactgatcccagccgcaagtttgggggttcccagggccaccctcacttcaggcaagctgactatacattcgcaggacccttagggtcctttggggccaaaatgactcacagaactccggaaagtgctatgctgacagttgtttttgttttttttttttgagacagagtcttgccctattgcccaggctggagtgcaatggtgcgatctcagctcactgcaacctttgcctcccaggttcaagcaattctcccgcctcagcctcccgagtagctgggattacaggcacccaccaccatgcctggctaatttttttgtgtgtatttttgtagagatgggatttcaccctgttggccaggctggcctttaactcctgacctcaggtgatccgcctacctcggcctcccaaagtgctgagattacaggcgtgagccaccgtgcctgtccacttacagcttttgtagcaaaagaatttaaatcagacaggcagagaggatagggcagtatctgggacagtgagttccaaatgaggagctgtgtccttggaggcacattactgtccccacattgatgtgtggcaagatgtgcagagaatcgccagcctaggccggtcacccaagcttcagtgtccaaagttttactggagtttcctcatgcaggcaggattgactgattgattgactgatgattgattggtggatgcagccccagcagttgctgcagagtccccagctctctcccaccttgcagatcattcccaactctctaagcatgtggttggtctttctggtgtggccagaccccacttcaactataaggtgcccaacttaagccactgcattcgcataaacgatcaggtgtggtcccaggggcccagcatgaataacaaagaccctttcacgtgggaaatgccagtggtttagaggttacctcccaggagccaagacaaagccagtcctgttcggtaaggttaattatgattattataattactattttgagacagggtcttgttctattgctgaggctggcatgcagtggcacaatcatggctcacagcagccttgacctcctgagcccaagcgatcttcctgcctcagcctcccgagtagctgggaccgcaggtgcatgccaccacacctgcctaattttttgaatttttggtaaagatggggtctcactttgttgctcgggttggttctgaactccttggctcaagtgatcctcatgcctcggccttccaaagtgctgggattacaggcatgagccaccacacctggccaagatgaattctttcttatgcagttcttctttaccttgactctttctacctgctcactccatctctgcccatccctgtcccttcaattcctcacagctgctttcattgctaaattgaggttctcatttttatcttgtccccataacctctgacatcagtgactgcaccgccattccttcctggacgtctccctccgcagacatccgtgactgcaccccccccccccgccccgaattccttcctggacgtctccctccgcagacatccgtggcggcacctccccattcctccccattcctccccattcctccccattccgccccatgcctctccggatgtctccctccgcagacatcggtgactgcaccacccgccccattccttcctggacgtctccctccgcagacctccgtgactgcaccctccccgccatcccccccattccttcctggatgtctccctccgcagacatccgtgactgcacgcccccccttccttcctggacgtctccctccacagacatccgtgactgcattccccccttccttcctggacgtctccctccgcagacatccataactgcacacacacacacacacacacacacacacacacacacacaccgccattccttcctggacgtctccctccgcagacatccataactgcgcgcacacacacacacacacacacacacacacccattccttcctggacgtctccctccacagacatccgtgactgcatccccccttccttcctggacgtctccctctgcagacatccgtgactgcacccccgccccccattccttcctggacgtctccctccacagacacccgtgactgtacccccccactccttcctggacgtctccctccgcagacatctgtgactgcagcgtgactgctctagcttctttgatcttttcttttcctcatcagtttcttgttttgttatctcatctcactctttttttttttttttttttttccgagacagagtctcactgtgtcgcccaggctgcagtgcagtggcaagatctcagctcactgcaacctccgcctcccgggttcaagcgattctcctgcctcagcctcccaagtagctgggactacaggcatgcgccaccacccctgtctaatttttgtgtttttagtagaggtagggtctcaccatgttggccaggctggtctcaaactcctgacttcaagtcacccacctgccttggcctcccaaagtgctgggattacaggcatgagccaccgtgcccggccttgttttgttatctctgaatgaagatgtttcccaaggctgggagcgcctctttcttttcttttctttttctttttctttttttagacagagtctcactctgttgccaggctggagtgcagtggcgagatctcggctcactgcaacctccacctcacaggttcaagcgattctcctgcctcagcctcctgagtagctggattacaggtgcacgccaccacacccagttaattttttaatttttagtagagacgaggtttcaccgtgttcgccaggatggtctcgatctcttgaccttgtgatccacctgccttggtctcccgaggtgctgggattacaggcgtgatctcctctttccttgatctttcccttgttgatctcctccatcctcctgcagatgcagtctcaggagtccgtttccagccgggacttttcttcggggcttcggtagttccacctgagctcccatgtgcagagtgtctactgataaggcccactgccatctgaaactcagcatgtggagagccaactgcccacctcctctgtcaatgtcattcttccagctacttgggcttaggagcctcagagccctggctgccctggccctgagtgggtaaggggccttctctgtgttcccacgataccactgcatgccctggtcattgcgcttcccagagtgtggcatgggaacccttctacatattctcctgactaggctgtgagcaacttgagggcatgtacagcaccagtcaattgtcccccatggccaggcacagtggctcacacctgtaatcccagcactttgggaggctgaggcaggcagattgcttaaggccaggagttccagaccagcctgggcaacatggtgaaaccccatctctacaaaaaatacaaaaattagccaggtatggtgatgcatgcctgtagtcccagctactcggtaggctgagatgggaggatcacctgaacctgggaggtcaaggctgcagtgagctatgattgtgctactgcattccagcctgagtgacagagcaagaccctcccccccccccaaaaaaaaattgtctgtcacatcagagagcatgaggggagaatgagctatggctgtcttcttcgttctgttatttacttctttcctgtgttactgagctcataaccaaattgtccttttttttttttctttaaggctgtcccttctctaaactatgatgctaccagagtaacctgcctctatggctcctcactgaatccaggttgtttcttcaactttacccatagcttgcctttctagaaacttccacacaggaggactgtcttctattcctcacctaaacaagctcccagttccagccaaattgttttctttccgacttgactaggtgatattcccagctacctgtttctttcccaaccagggatccttttgctcctcaggaacaatttcttgtccttcaagtcacattcctacccagccttcctggcacagcacaaatctcatctccccttaccacccatttgtcatctttgagctttttttcagctattgctggggaacgttaagacacacataacatacgactttgtgctgataattctttctctaagtctattactatttcttttcccctagttagactgaaagtgtctgaacagcaaagcccatgtcttattcatctttgcatcatttggaataacttttgtgtagaaaattctcaatgaagtaaaataaacaattccgtctttcagttcaactttggagacgtctttgtccaccaagccatccacaccatcgagtactgcctgggctgcatttcaaacacagcctcctacctgcggctctgggccctcagcctggctcatgcacgtgagtgagcagcccatcggggggacagtcagctctccccaacaccccaggaaataggtgccatgtatttggaagtaaaggtgacttctccgagctatttgtggatgtttgccaaaagaatgactcttctttcccaggcacaggtgccttttctgtgggtctggctgcacgttgctggggtggtcaccctctatattaatagtctcctactgctgctgtaacaaattgtcacaaacactcgtggcttaaaacaacacaaatttggccgggcacggtggctcacacctgtaatcccagagctttgggaggcagagtttgggcgaattgtttgagcccaggagttcaagatcagcctggccaacatggtgaaacccgtctctactgaaaatacaaaaattagctgggcatggtggcgggtgcctgtaactctagctactcggagactgaagcaggagaattgcttgaacccggaaggcagaggtcgcagtgagccgagatcacatcactgcactccaccctgggctacagagtgagactccgtctcaaacaaacagacaaacaaaaaacccaacaacacaaatttggtgtcttccagtttttgaagccagagtcctaaaatcaaggcgtgggcagccgtgctcctgctgcaggctgcaggtagaatttgtttcctggcctttccagcctcttgaggctgcctgcattctgtggcttgcggctcctctttgcatcacttcaacctctgcttccagcatcaaatctcctttttctctgactgtgactctcctgccttcctcttacaaagactctagtgatgacattgggcatatccagataatccgggataatgcccctctgtcaggattcttggcttaatctcatctgcaaagccactgttgccatgtaatatagtatgttgacaggttattaggattagaattaggatgtagacatctttggggatgggggaacatattttttcaggctaccatgcccttctgcaaggtgctgacctttaagagaacgcctgccttggttatgagcattgcggggagtcagttggctgcctgctgagctgaccctcaggaagtgctcaccacctttgtgaattcacagcagtccaggatcagtcaggccaggcccagaaatacaattgtatctatctatctatcatctgcctgtctgtctgtctgtctgtctgtctatctatctatctatctaaaagagacaaggtctcactatgttgcccaggctgatctcacactcctggcctcaagggatcctcttgcctcagcctcccaaagtgctgggatttcaggcattggaaatacagttttgataaagatccgagcccctggggttgcctaacgtcaggaatcatgactcaccaactcacttgtaagccccatcttgatctctgggtccttctccagtcttgtttcttgtcagttttccttagtgccccagcactccagacccatccgtttcatatgcagtggccctgaggagcgttttttttttttttcctaagacagggtctccctctgttgcccaggatggagtgcagtggcgctatcacggcctcgaactcccaggctcatgtcattctaccgcctcagcttcccaagtagctgggaccacaggtgcatgccaccatgcctgggccaattttttttttttttttttttggtagaggtagggttttgcctttttgcctaggctagcctcaaactcttgggctcaagcagttctcctgtcttggcctcccaagtagcagggactataggcacacaccaacatacttggcgaacttttttttttttttggtagagacagggttttgccatgttgcccaggcttgtcttgaacttctgggctcaaacagtcctcctgccttggcctcccaaagtgctgggattacaggtgtgagccattgtgcctggcctgaagaactatctcctgaagacgcagtactccctgggcccctctgtgtgtttgcccctgcagcccccttgcctgaaatagtcccttctttaattctctctctatctgatatttaattcgtccttcataactcagctggaaatcttctttcctagtcccccagtctggaagatgccttcctgtggttctggggcatgctcttaacctagcttcaattataattgtcttgattagcctgtcttcctactggactatgagctccttgaaagcaaagaacctgacttttatcttagcattcctggcactgagcataatgcctagaacagagaagccaggccaaggtgtgtgctgaagggatagaaacgaaactccagtactcagcattcgtgtgatcttcacagctcagctgtgttcatttcctcccacaaactcacatacacacactttcacatgcacatgaacgctgatgcacacactcagccctgcaagtggctgcagcacagacacccataagcatatctttttttttttttttttttcaggctggagtgccgtggcgtgatctcggctcactgcaacctccgcctcccaggttcaagcaattcttctgcctcagcctcctgagtagctgggactacaggtgcacaccaccatgcccagctaattttttttttttttaatttttgtattttcagtagagacggggtttcaccatgatggccaggatggtctcgatctcttgacctcgtgatctgcccgcctcggcctcccaaaatgctggaattacaggcgtgagccaccgcgcccggccgcatgtctttactcctgtgcactgctgtgcattcatgtgaagtggctgtcccaggactgtcacctacttgttccttagagtggatctcagcgcttcgtgcagtcagtggtggtaatgttggtcttcagctctaaccccagcagtagttggaggacttgagtcataatagggctgagtctagataagacaggaggaggagttttggtattcttggccctatgtgtcggggtgtcctctggccagcccatacacacactgagggggtcatttgattcctaaaaacccatatggttcatggctgcctgccctgattcacccactgggtcattctagaagtccctgctagacgtggcttccagtccatactaacacagttgcttaaagaggtaatgtggaaaaatggggaaaaaattaaaacactgacttaaattctggttccttttctaccacttttggttgagtaacttatacaagaaatttaacctttgtgtgccggggctttcatcagtggtcctagtagttagcctcctgcactggtcaggttaggctaaactctgttgcaataacaacttaccctctaaatctcaggtccctaggccagagtttggcactatgtgttggggtgtcctctggccaaaattcctcctgtcttatttagacccatccctggtatgacccaagtccttcaaactactgctgaggttggagctgaagaccaacatcaggaccacggatgacttgaagcgctgagatccactttaaggaacaaagtggggctgggcgtggtggctcacacctataatcccagcactttgggaggccaaggtggtggggggattacctgaggtcaggagttcgagaccagcctggccaacatggtaaaaccccctctctactaaaaatataaaattagctgggtgtggtggcacacgcctgtaatcccagctactcgggagggtgaggcaggagaataacttgaacctgggagctggaagttacagtgagccgagatcacaccactgcactccagcctgggtgacagagcgagactctgtctcgaaaaaggaaaaaaaggaacaaagtgggtgacagtcatgggatagccacttcacacgaatgcacatcagtgcacaggagtaaagacatgctcatgggtgtctgtgctgcgggtacacgcagggctgagtgtgtgcatctgagtattcgtgtgcacgtgaaagtctgcgtatgtgagtttgtgcaaggaaatgaacatagcctgagctgtgaagatcacacgaatgctaagcactggagtttctactgtaaatctcaggtacgggtctaacccgacgggggtgaagctgctcccattgatgaaagactctgcatcactgtagcaggcagaaaaccagatcttggggggcagcaagcaaataggggtcctcttccttgcgttccatgtctctgcgtttatcatgttctgatagccgcttgcaagtggcaggcctgtgtctctctgggctacatcattgtgaccttttagcaggggccttcaaatctcaagccaaggatgtaatgatgctatttccctgcaaggtgcatatcccaggctgttgggcatgataactagggaagaagcattcacacgtgctctgtgaccagggacacctaagcatggacccttacttgcataggttggacagtgagagcccttgtagggcagttagctggggacacgggctcagctacgagtccgggttttttccgatccccatccatgacctccctcctcttggatttcactcccctcagggccttttaaaacattccccgactgtcagcctttgagagactccatgggcatgtaagaaatgtgtagaaaagacctttagagctgggggtgtgggaaacagctgaggaggtaacgggtagggaagtgggggtggggggacggtggtgtcataggaacaggccagagggggctgtgtggcatttgcccctgaacttttcggaactttagtttccttatctatgagatgggcatcataaaacctaatttatagggttgatatgggccttactgggataatatgtgtaaactgcttcgaattcctctgacttggctcttaatttggagtctgtggctgaacttcaggctttctgtaaatcccctgaaactacgtataagatgttgttgggcgtctctgtgtgcatttttctggggaaaggattcatgactttcttcagattccagaggggacccgtgaccaccaaagagtgaaaagagccactttcccgagtgaggctgaattcacctcctgtgctcagtacctggcatgtgcccttgtacattgcagtgactgaataaatattagctaaacgttttttgaaatgtggttaggatttcaatctttttaaaaacatttttactttgaaatatagcatgtttacaaaaatgcataaaatatatattcagcctaatggatttttgtaaagcaaacactcatgtaaccacttcctggtcaaagaagaggctgtggctgggcgcggtggcttacgcctgtaatcccagcactttggaggccgaggcgggtggattatgaggtcaagagattgagaccaccctggccaacgtggtgaaaccccatctctactaaatatacaaaaattagctgggtgtagttgcatacacctgtagtcccagctactcgggaggctgaggcaggagaattgcttgaactcgggaggtagaggttgcagtgagccaagatcacgccattgcactccagactgggcgacaagagcgaaactctgtctcgaaaaaaaaaaaaaaattaacagacagtggcggcacacttctgtggtcccagctacttaggaggctgaggtgggaggatcactggagcctgtgaggtcaaggctgcaatgagccataattgcactatggcattccagcctgggtgacacagtgagaacctgtctcaaaaaataataataaaataataataatctgggctggatgtggtggctcacgcctgatttcccagcactttgggaggctgagacaggaggattgcttcaggccaggagttggagaccatcctaggcaacagagtgagaccctgtctctatttaaaatatatatatatttttaattaaaaagatgagaaaatacaataaataacaatctgcatttacaagataatcccagtggtttctcgtaccttgcagaactgtctgaagtgctctggactatggtgatgaacagcggccttcagacgcgaggctggggaggaatcgtcggggtttttattatttttgccgtatttgctgtcctgacagtagccatccttctgatcatggagggcctctctgctttcctgcacgccctgcgactgcactggtaaggatggttgtcccctggaagctcaatgtggtgttgggaaagggagtgggctgtggggccagccgactgggttcagatcgtgagctgtatgtgactttagcagcttacatacctctttggagccttagtttagtcatctgttggtgtaatattaaatgatgtaatatatgtgtatatatatgtatatatacatatatacacacacactcattcatacttattcagactctcatatatgttagttctcatttactccttcccttttagatgatcagtgttcatttgttattacaattggctttaacccaagtgacatttccaagtattggcaaggtggcatctgagataggctcacagaagacatgcttagaaaatctggaatatttggctttttttttttttttttttttttgagacaggctctcactctgttgtccaggctggaatgcagtggtgcaatcttggctcactgcaacctccacctaccgggttcaggcgattctcctgcctcagcctcctgagtagctgggattacaggcgtctgccactacgcccagctaagttttgtatttttggcagagacggggtttccccatgtttgctaggctggtctcgaactcttggcctcaagtgattcacccgcctcagcctcctgaagtgctgggattacaggcatgcaccgtcacacctgactaatttttgtatttttagtagagatggggttcccctatgttggccaggctggtctcaaactcctggcctcaagtgattcatctgcctcagcctcccaaagtgctgggattacaggcatgagccactgcgcccagtgaatctgggatgtttggctcttgttgctgagtagaggagttataccaacaaggtatgaaaatctcaaaagtggaaagagaaggagggtaccaccaggagggagacgctcaccgggagccctggacatgcacagatgtatccagtgacaatcagccgtcgttaggttgatgaatatggaaacatgtttaggcctctggttgtcttccaagttacatttcaaccaagaattctgagtgtgcagtgcatgcccttcagctgcagagactgtacccagcttgccctgatgttttcttcctccctctatggccactattcataaagaagcctttgcacttcatgtactgagtgaggagagccacagcatcccctgcctccatgatgacgtcattcccctccatgtcattgaggagaggaactgaactctgtaaattaataaaacataaatgaggctgggcacggtggctcatgcctgtaatcccagcactttgggaggccaaggcgggcggatcagctgaggtcaggagtttgtgacctgatcgacgtggagaaaccccgtctctactgaaaatacaaaattagctggggtggtggcgcatgcctgtaatcccagctactcaaggggctgaggcaggagaatggctggaacccgggaggtggagcttgcagtgagctgagatggagccactgcactccagcctgggcaacagagcgagactccgtctcaaaataaataaataaataaataaataaataaataaataaataaataaataaataaaataaaacataaatcatccgacatggtatcagttatgtgagttacaaaaatacaggtcaagggtctttgcgttctataatatgtgagtcccacattttagaattagctggaaatggaaaatgacatgagagagtgctgcacagtgagggtgtcttggcttgtcatgggggtggggaagctccttccatgaaggaagagttgttatgctgtgaccatgagcccacaagcagagaggcctggaggaaatgaaggggaggggaaggggaaggtggtaagagacagatgagagaagggcttaaaaaatcctcagattcatggcctggatgcagtggcttacacctgtaatcccagcactttgggaggctgaggtgtgtggatcacctgaggtcaggagttcgagaccagcctggccaacatagcaaaacctggtgtttactaaaaatacaaaaattagctgggcatggtggtgggcatctgtaatcccagctactcggaaggctgaggcaggagaattgcttgagcctgggaggcagaggttgcagtgagctgagatcgcactattgcactccagcctggaccacaagagcaaaactctgtctcaaaaaatatatatatataatatatttatttttatatatatataaatatatatataatataatatatattataatatatatattataaatataaatataaatataaataaatataaatatatttataatataattattatatagaatatataatataatatatattctatataatataatatatattatataatatattctatataatataatatattatataatatatataatatattatataatatatataatatattatatattaatatattaatattgatgtatatataatattatatataataatatatatgatatattatacacacacacacacacacacacacatataaattagctaggcatggtggtatatgcctatagtcccagctactcaggaggctgagacaggagaatctctcttgaacctgagaggcggaggttatagtgagccaagatcacgacactgcactccagcctgggtgatggagcaagactctgtctcaaaaaaaaaaaaaaaaaaaaaatcctcaggattctcatggcagccatcagcctgggtgcctgccgtggccaacccttctgactttgtgcttgattttacgaacgctctgcttcctccttccctccaccttccagcctctaactgatgtgtttcaatctcccatttcttaccccacggcctcccctcaacaacagggttgagttccagaacaagttctatgtcggggatggttacaagttttctccattctcctttaaacacatcctggatggcacagccgaggagtaggctgagggctgcacctcccacggtggtcaccatgccaatgaaggaagttcagtcttgtctttgatatcagcccctgcaaggcgctcaatgggaaggttgttcttggctcacctgaagcatgaaactgtgtattatttggacgtcagcctgtggatttgatacgacttaaccacgtcagaggaaggactttggcaagtgatattgtcttcatgtggggtattaattctcaaataataaagtaattgacaaatgaggggagaatgctaaacagatgtcttcttgcaatattttaaatattgtatttgagaaaataaacatctgagtcattcactttttccttaagatgtctttattcggccaggcacagtgactcacgcctgtaatcttagcattttgggaggccgaggcgggtggatcacccaaggtcaggagtttgagaccagcctggcaaacatggtgaaactctgtctctactaaaaatacaaaaattagctgggcttggtggcaggtgcctgtaatcccagctactcgggaggctgaggcaggagaatcgcttgaaccccggggggctgaggttgcagtgagccgagatcacaccacttcactccagcctgggcaaaagagcaaaactccatctcaaaaaaaaaaaagatgtttttactcaaaattattccataccagtctgggcacagtgactcacgcctgtaatcccagcactttgggaggctgaggcgggtagaatacctgaggttgggaatccaagaccagcctgaccaatatgttgaaaccccgtctctattaaaaataaaaaattatctgggcatggtggcaggtgcctgtaatcctagctacttgggaggctgatgcaggagaattgcttgaacccaggaggtggaggttgcagtgagccgagatcaagtcacctcactctagcctgggtgacagagcaagactccatcttggaaaaaaaaaaaaattattccataccatttactactgacaattataggccaaagctgaacaatagagctacacaaactaatcccagagaaggatcatgcatattgtatttcctcatttcctccttcctcaaacacctttttccgttgtctagggctaagcattacaagcttaggaactttctcatgaattttcactgaggaagaagagataatgttctctgtttggagggagggccgcccccggtgtggctctctggttgctaaatcctgtgaaatgaagtgtggcaacatgacatcatcgaggactttgtttactgtcaatgcacgttatgctggagtaactggagaaagagatttggaggcttcgacaagttcagaaaatggtgtgctgggaggaaaaccaccaagaggtctggcccgttactccctggctctgtgggcaccaaagtcattagtcatttcttaagtgcctgcactaacaaactcctaagagtccgataagttatatatatgatacacaagatatatatcatatatgatatatgtgataaacaagatatatatgtttgcatatatatatagagaggtagggtctcactcttgcccaggctggagtgcagcggtgagatcacagctcactgcagcctcagcctcccaagctcaaatgttcctcccacctcagcctcctgacgagctgggactacaggtgtgtaccaccatgcccagctaatattttttagtttttttgtagagttgccgtgggtagggggtgtctcactgtgttgcccgggctggtcttgaattcctgggctcaagctatcctcccgcctcagcctctcaaagtgctggggttacaggcatgagcacccggccccactgactgttttgtctgaatggactttatccatgtaggttattatcttcatggtaactatactgatagaattaagtataattatctttttttttttttagtgcttttaaaatttacaaaataatagtatcttatttaattttaaattttctttttctttcttcttcttttttttttttttttttgagacagggcctcactctgtctcagggacttgctggagtttagtggtgcaatcttagctcgctgtgacctccggcctcccaggttcaagcaatctccagcctcagcctcctgagtagctgggattacaggcaaccgccaccatgcatggctaatttttgtacttctagtagagacgtggtttcactgtgttggccaggctggtgtctcgaaatcctggcctcaagtgatccgcccgccttggcctcccaaagtgctgggattacaggtgtgagccaccgcatctggccagttctaaattttcattgttagtaaagttctaaaagagctgattaaattcaaaatatgctttggatgagaccctgttttttaagtgcctacgtgccctgtgtgtggtaaagctgattggtgctcatggaagcggcattgctcaaacctaaaaggaagcttctgtgtcaccttccatgtcagtatcatgacttttccagcacagtggaaggcacatattagatgctcaatattcacttaatgagattgagcaaaagaatgatagctaaggtcagaaggtgtacatgtttgagtcccaactttgatgctttatcatgagtgccctcaggaaagaaatggagttgttcccctcattgccgaatggaaataatgatctccacctctctggactgtagaaaaggtggttgtaaagccctgggtgtggaggagatactgtcagtgatggttgaactgggagaatagactaagacagcatgcaaatggagggataagaaatctaccaatcccatgctgccatggccactggacgattttcaggttctcagctcacaaatgtccttctcaacaactatctaaaaagaaccctgtgcttaaatggatcaccagcctgttgatccttaagtctattttttttttaatttttatataccactgtgtagttttaaattagaattaggccaggcatggtggctcacgcctgtaatcccagcactttgggaggtcgaggtgggtgaattgcttgaggccaggattttgggaccagcctggccaactggtgaaactcctcatctactgaacgtatgaaaattagccaggcatggtggtgtatgcctgtaatcccagctactcaggaggctgaggcaggagaatcacttgaacccgggaggcggaggttgcagtaagccgagatcacgccactgcacttcagcctgggagacagagcgagacaccatctcaaaaaaataaaaacaaaaaatttttttaaagtaaaaaattagaactacctaaaagacattgcacctttcaagtgtatgacagtgtaacagtgtttaacagttgttttattaagtgaatgcttgaacgtattcaacattaaattcaatttacttcacagtaatgtttgcaaatacattatcacttcttaaatatttcaaatcaagcaacttgaagttcagaaggcttgctctcaaataactcttctacagtgacgcaaagactgaaaggagcctacaacttgagtcccagtctctaaccaacaatgactgtgtcctcactggtgaacccatatgagggagctccaagctcaagaggggcaggccccttccagatcctcccagatgcatctgtgtgacccccagcaagggcagtaatcaccaccaaaatcttcatttgcaataggtgtacaacaggatgaatgcaaacgcctagtaaagaaactcgaatgggttaccctgataggcattgcactcattctttactccttttttatcttttttttttttttttcagacagagtctcactctctctcccaggctggagtgtgcagtggcgcgatcttggctcactgcaacctccgcctcccaggttcaagcacttctcctgcctcattctcccgagtagctgggattacaggcatggaccaccacgcctgactaatttttgtatttttagtagagacggagtttcaccatgtttgccaggctggtcttgaactcctgacctcaagtgattcacccgccttggcctcccaaagtgcttggattacaggtgtgagccaccactcccggcccatcctttacttcttcttcttcttcttttttttttttttttttgagacagattctcactgtgttgcccaggctggagtgcaatggtgcaatctcggctcactgcaacctctgcctcccaggttcaagtgattttcctgcctcagcctcccgagtagctgggattacaggcacatgccaccacgcctggctaattttgtatttttagtagagatggggtttcgccatgttggccaggctggtcttgagctcctgacctcaagtgatctgcccacctcggccttccaaagtgctggaattacaggcatgagccactgtgcctggcccttaaatcatgctatgggccctcagctgggactcttcaactgcaggttcttggtcaatttccttcttggttctgtggcatacaaacagggatttgcctctccatttgaaagccatgttcttgccttctggaatatcaaataacttgattgcaattttcgacacggccgactcatcagcagaagcactgatgctggaaacaaactgggagatgacattcttggcagcatatgtgacacccacagcagttgttgcagttaccaaataggagaaccctttcctagcctcgccatcctcttttgaagactttgtcccatcaaaaatctcaatgcaacagtaatcagggaagtcaggcacattgatgtctgtatgggaataacgaacagaagcagggacattgaggcccacagagttgacccaagacaggctcatggcctggccactcagtgactcctggcatagcaaaggctgctcttgtacagcacaggcagcttcagggtggcaggcaccatggcctataccaggggctacagcatgcctgccaccctgcaggatatggctgacaggatgggcatgaacctgctccttaattctaagcaatggctgtgagcaaatgtttgcaagggcaaagcttccctctgccccttgcctaggtcttctctttcagaaattcttccagctgtcctgagaacaacatagtaatttcctccaaagttcggcagcctctttcagtcttaacaagaaatgtaatttcccctttaaaaggagatcaagtgcaggctgctgagaagagggtgtgccctaggtgt

SEQ ID NO: 1790 - protein, 821 aa, Homo sapiens [sequence omitted]

SEQ ID NO: 1791 - DNA, 20300 bp, Homo sapiens
  source
  (1)..(20300)
  CDS (201)..(356)
  CDS (1537)..(1654)
  CDS (2624)..(2893)
  CDS (2920)..(3159)
  CDS (7553)..(7667)
  CDS (8025)..(8203)
  CDS (8414)..(8849)
  CDS (11846)..(12057)
  CDS (12746)..(12861)
  CDS (14055)..(15351)
  CDS (20000)..(20100)
cgctccagccattcagcagctccgcctggacgtcaagggcatgtccaaaaccgcgctcatgatcttcctactcccccatccctgagatttatcctgtggctgtggtgtcctgtggctactgtaacaaatgaccacaaacttggtggcttcaaacaaatttaatctctcatggttctgaaggccagatgtccaagatcacgatgacggcaaggccgcgctccctctggagactgtcggggaaaacctgcccctttcctcttcagcttcaggtggtggctgccatgccctggtgtttcctggcctgtgaccgcatcattccaatctctgcctccatcttcacgtggccttttctgtatgtgccggtctaatcttcctctgcttctctcttattttttgttttttgagacagagtctcactctgttgcccaggctggagtgcagtggtgtgatctcggctcactgcaaccgccacttcccaggttcaagcaattcccttaacttagccccctgagtagctgggattacaggcgtgcactcagcaaatttttgtatttttagtagagacgtggtttcaccatgttggctaggctggttgtgaactcctgggctcaagggatccaccagcctcagtctcccaaagtgctgggattacaggtgtgacccactgcgcttctccctataagagaggccttcctctgcctctctcttatagggatacttgtgatgccatgcaggacctgcccagataatccaggataaccttctctccaaatccttcccctgatcactcctacagatctcttccatagaaggtgacatttccaggctctaggaattaggacctgctctctctgggtggccgttgttcactccaccaccccaggtttccccatcctaccaaaagacacagcagcattgtgtcaactgcccaaactgaaaacctatgagttattctcgacctgacctttttcctgagcaagttctgtggatttaacttagcggtcacactgccaacttcaaccgaactccactgccaccaactcagtccaggccaccagttcttgtttaggtgactgccatgacccccattggtctctccctgcctcaactctgtcccctccatcctatatccccacactgtaaccagactgattatttatttatttatttattttttggggaaagaagcttgctctatcccccaggctggagtgcggtggcacaatctcagcttactgcaacctccgcctcccaggttcaaacgattctgcctcagcctcccaagtagctgagattacaggtgtctgccacaatgcctggctaatctttgtatttttagtagagacgggttttgtcatgttggccaggctggtctcaaactcctgacctcaagtgatccacctgccttggcctcccaaagtgctaggattacaggtgtgagccaccgcacctggccagactgatctttaaagaagtatacatgaacacagcactccatgacttaaaacccttaagaggactaccatttatctcaagataaaagaacaaaatcctcgctgggcacagtggttcatgcctgtaatcactgctttgggaagccgaggtgggaagatcactttaggccaggagttcgagaccatccatgggcaacatggtgagaccgcatttctacaaaagataaaattagctgggtgtggtggtgcacgtctgtagtcccagctacttggagggtgaagtgggaggatcacttgagccctggagttcgaggctgcagtgagctatgacggtgccactgcactccagcctgggtgacggagtgggacctcatcaaaagcaaaaacaaaaccgttattgtggctttgaggcctggatcataactacatcatttaatttggccaaaccggcccatttcaggtacccaaataccccacgtgctttcttgcttggctctgggactaatgtggttactggtgcagggtgagtggcaggtatcatgaaccacattgtggacctggagttgctaggaccttttctgccattacacagaaaaatcctccctgagaacacagccattggaggacacatggcagaggaagataagacaataaacagagacacataattatggccagcgtgggggctcacgcctgtaatcccaaaactttgggaggccgaggtgggcagatcacctaaggtcaggagttcgaggccagcctggccaacatggtgaaaccccgtctctactaaaaatacaaaaattagccgggcgtggtggcacgggcctgtagtcctagctactccagagggtgaggcaggagaattgcttgaacctgggaggcggaggttgcagtgagccaagatcgcgacactgcgcgacagagtgagtctttttgtctgaaaaaaaaaatatatatatatatatatacacacacatacacacatatatatatacacacacatatatatatgaaatgaccaatacacatgtgaacatattcaacgcaataactgcggttaaacagcagtaaaatcccattatttatccatcagattgacaaagactgaagaactggagaagaagtggcgaaacgggctcgcagcgtcgcattccctaccccagcaggtgcgcccgcagcgtcgcactccctagcccggcaggtgcgcgatcacacacacaccctgcagggggacttcgaccggcacttccggtcccggaagggcatgcccttggaccccggaagtccgggcgggggcagagccgggtgcgctttgcgacagagccgtaaaggcgcgcgggaacatggggctgtacgctgcggtggcaggcgtgctggccggcgtggagagccgccagggctctatcaaggggctggtgtactccagcaacttccaggtagcgggcccgggcgccacaagtaggggtggggggtgaggaacccggggtggggtgggacgggcccggatggggtcgggaggtggggcccggcgaggagggccgggggagcccccgacccagcttgtctccctcggccacacagaacgtgaagcagctgtacgcgctggtgtgcgaaacgcagcgctactccgccgtgctggatgccgtgatctccagcgccggcctcctcagtgcgaagaagctgcagccgcacctggccaagggtaggggcggggcggggaagtgaaccccgacggtcagcgctttgtcatctggtttcagccccgctgccgtgcacggcgggactggagcaagtcgctcacctgaaatgagtatgagcagaccttccctgggttacgaattgagatgggatgaaaatgctttaacttcgagtgttttgaaggattaaataaccgaagtacaaagtagtagtagcggagacagtaaggaagtcgggcgtggcggcgcgcacctgtggtcccagctactcggaaggctgaggggggaggatcacttgagcccaggagttcgaagctgcagtgagctgtgatgtggccactgcacttcagcctgggcgacagatctagaccccattctaaaaaaaaacaaaaaccccaaacccacacccacgaaagggtaatgttggcaagaagttgggtgcagaggtctactggtgaacatctgtggggaaagggtctaaggctgggaagcgagacgccaggttccgatcctgttgtgtagttaatttctggtgtggtcttgagtaaggtaccccacctttatctgtaaccatctagtcaggtgatctctttagccattccagtgcccgggctctattagagttagttctaaggcattcatacttcttgcttagggcgtttctgtctttgatccctcatccccaggtgctagtgtatgagttgttgggaaagggctttcgagggggtgggggccaatggaaggctctgttgggacggcaccaggcgaggtgttgagttggctcggctcaaggttcttcggggtgtgagctggcatgaggacctgttggaagtgggatccaggcctggtccaggtgagctggaaggagttgaggggcgggggaggtggggaactttgctcctgcctactcactgctcattgcgtcctacctagcctcccagctgcctcgatttgtgcgtgtgaacactctcaagacctgctccgtttatgtagttatttcaagagacaaggtttctcctatcagggtcgggcttccaggtgagagcttagagccctggctgtcctcatctagggaggtgtctggggtactgggaagagaagtggttggatagttgtgactttgctctctgggctttgttcctacctttccagcagtttctccatctccaaggtttgttttcctcgcatcccttaaacatcgaactcctaggagccccatcctacattcttccggagctctccgttttttctctaactttagctcctgcctcccacctggtgattctcaccgcccagtgtagacttcccttttgcattcttccctccttaggttcacatgaatgcaccacagatgccacagtcgctgcattcatctttcctctcagactttacacttagtacatccccagtttaatctaacagatgtcaccgttttccacccatttggtcaagccagaaaccgagtcatcctaggtgcttccttcccctccctccaatcatttactcctccaccttgagcatctttctcagctccactcctttttttttttttttttttaggactgagtcttgctctgtcactctcaccgaggctggagtgcagtggcatgatcttggttcactacctccaaggttcatgcaatgctccttcctcagcctcctgcgtagctgggattagaggctcccaccaccatgtccagctaattattgtatttttagtagagatgaggtttcaccatgttgaccaggctggtctcaaactcctgacgtcaggtgatctgcccatcttggcctcccacagtgctgggattacaggcgtgagccacagtgcccggcctccactcctttctcttaattcccccggacactgcctaggttaagcactcatttcttattgggatgaccacaagaacttcccagactggtctctctgcttccagactgtctcactgcattttccttgaggttgactgtaggaagctctaaaggcagatctgatgcattactcctctgctaagcctttttttttttttttttttttgagagagttttgctcttgtttcccaggctggatggagtgccctggcgcgatctcggctcaccgcaacctctgcctcctgggttcaagcgattctcctgcttcagccttctgagtagctgggattatgaaggggtggcctgcccctccacatctgtgggatatctcatcaggtgggacaagagactgagaaaagaaataagacacagagacaaagtatagagaaacaacagtgggcccaggagactggcacttagcataccaaggacctgcaccagcactggtctccgagttccctcagtttttattgattattattttcattatctcagcacaaggaatgcggtaggagagcagggtgataataaggagaaggtcagcaaaaaaacatgtgagcaaaggaatctatgtcataattaagttcaaagggaggtactatgcctggatgtgcacgtaggccagatttatgtttccctccgcccaaacatctgtggagtaaagcataacaaggcagcattgctgccaacatgtctcgcctcccgccatagggtggtttttctcctatctcagaattgaacaaatgtacaatcgggttttataccgagacattcagttcccaggggcaggcaggagacagtgcccttcctctatctcaactgcaaggctttcctcttttactaatccacctcagcacagaccctttacgggtgtcgggctggggcacagcctctcatcccatgaggctatatttcagactatcacatggggagaaccttggacaatacctggctttccagggcagaggtccctgcagcttttcacagtacattgtgcctctggtttattgagactagagaatggcgaagacttttaccaagcatactgcttgtaaacgttttattaacaaggcatgtcctgcacagccctagatcctttaaaccttgattccatacaacacatgtttttgtgagctcaaatttggggcaaagtcacaaattaacagcatctcagccaaccaattgttcaaggtacaggtcaaaatggaatttcttatgtcttccctttctacacagacacagtaacagtctgatctctctttcttttccctacaggattgcaggcatgcagcaccatgcctggctaattttgtatttttagtagagacgggatttctccatgttggccaggctggtctcaaactcctgacctcaggtgatctgcccaccttggcctcccaaaatgctgggattacaggcatgaaccaccgcgcccggccatgctaagtcctttcttggctccattgtgctgtccctcctgcttcctctccaggtccatctgccacagtgctacgtgcaccagcgtgccagcaacagtggctggtctctgccccgtgcctcctccactgggctcacacctgtcttattttgtcctttggtggctctgagaagcagcctctgcccctctccctttcccttactctttgtaagatcctcttccttctgccctaccatgttgcttggacaccagggtggaatagcagagaacggctgcttgtgtttgaattccagctctgccacttcgatagatttctgaactgagacatgtgactctctaggcctatttctgcatgggtcggagagtgggcgggactgctttactgagttatagtgaatgtagttttaacctaagcgcctcacatgactaactcctcatccatcaagaatgagctcagctctcacttccccactcctcacccccctgtaaagtaacctttctccaaggttatgcttcaacaggaatagctaacatttattaaattgtggcacgtaagtatcttggatatattggctcattgaatcctcacacctactattttacagagatgccagtggggcttgagattgaatcacttgcccaggctcccactgctggtaaacagtagagggggctcctgacccatcagtctggcttgacaacccattccctcaactgcggatcccggattcccttatcaccctgttgatttctccatagctgtggtaacatttgttgcatgaatggaccgttgaaatagggcctggcagggagaaattcaggaaatgaatgaatggttcttccctggcagccttgatgacttacaagccctcaaggggaagcattttctcctggactccttgatgccggagctgctggtgtttcccgcccagacagatctgcatgaacacccactgtaccgggccggacacctcattctgcaggacagggtaggcaagaggaatagaaaagggaagaatgtgtaggcacgggaagggcctagcctggggtctctgtttacccggcccctgtgttctgcctgccaggccagctgtctcccagccatgctgctggacccctgccaggctcccatgtcatcgatgcctgtgccgccccaggcaataagaccagtcacttggctgctcttctgaagaaccaagggtgagtgccacaggaggaggaggaggaggacatggggtttgattttgtgcctttcagtgggtaataaaggctgaaaggatgactttcgcttaactctttcctgctgtaccaaagtagttcacggtatttgccccaagctaagctttccccactgcaggtgtgagatgtggatcccttagcccttggggcagagaccccaggccagttacctctgaccctgggccctttaaatataggccgtttcaatattgtgtgtcctggcttaacctgcatgttctggttgtctgtgtcagctgtgacaggcccttagctgctccatgcatgctcagctcacccctgctctgccctctgccctaggaagatctttgcctttgacctggatgccaagcggctggcatccatggccacgctgctggcctgggttggcgtctcctgctgtgagctggctgaggaggacttcctggcggtctcccccttagatccgcgctatcgtgaggtccactatgtcctgctggatccttcctgcagtggctcgggtgagatggtgagaaggcgtggctgagggactcggaggtccacagcagcttagacctggagtcatctgttttggtcttagttctgacactttaatgggcttgggaccctggagcaaaagttctcctctgtgaggcaaggatttcaggagcgaggatttcaggactgaggcagcctgtgaagctgtgtaaccgagacacgcttttccttaggtatgccgagcagacagctggaggatcccggggcagggacacctagcccggtgcgtctgcatgccctggcagggttccagcagcgagccctgtgccacgcgctctctttcccttccctgcagcggctcgtctactccatgtgctccctctgccaggaggagaatgaagacatggtaccagatgcgctgcagcagaacccgggcgccttcaggtacagggcgggcgccagggtcgtggaggggggggatggggtgaactgctctcttacccagcattggggctgtttctcttgcaggctagctcccgccctgcctgcccggccccaccgaggcctgagcacgttcccgggtgccgagcactgcctccgggcttcccccaagaccacgcttagcggtggcttcttcgttgctgtaattgaacgggtcgagatgccgacgtgagtgagtgggggcatgcttgggaggcgcaggatggtactggcacatctaacatctacacttctctagctcagcctcacaggccaaagcatcagcaccagaacgcacacccagcccagccccaaagagaaagaagagacagcaaagagccgcagccggtgcttgcacaccgccttgcacatagcagaggctccaggctgactccttcctggtgggaaaggaagatgcctgtcctctccgtggaggaccctgggccctcaccgcaggcagcagtttgcattttgaaaggttattgggtcccttcctcgggctgtgttcttgctggtgagcaaaagtgttgcctgcagaaataaaatgcagaacgtactctacgatagatcacagttttttattcttaatgtcacaagcaggagaaaaatctcacattcatactaaaaattccaactagactcaacaggaatgaagtctctatttgtaatggaaagtcccagcctcccgctgccgtccagtgtgtgtactgtacacatccacactcactctcactcagggttcccggaccggctgtcctgcctgcggaactgaggtaaacaagctcaggtactgacactaggagggtctaccttacataaggtacaggtagaagcttgattgattgctaggcccaggcccacccagaccctccaatcctaacaggtatttaggcttgaggttcactccctcctcagctgcacacgcagccaggtataacactcgccctcagtcacaacggggagggggcaccggttacatctacatcacattatttataaaataagaattacatttcatataacatggccagaaggagctctagtcccccaggaaagctgccggggacagcatttgagcctcttctttgcacaggcataacttaactatacagctaattcctagttaatagcatttatacttaaccacctcaatgaaccaagcttgaaggaatttaaaaggcaatttagcttaaatacaaaaataaatttttgttaaaaaacgtttaaatatttttttcttttaatttagacacacgcattcatacttctcccaaagaggttgggcgtgacagcaaggcgcttgggcctggggtatgtggtttcagaaggacggaaggaaaggatgggctgcagagggccctgtttgggaaaaataggattttaaaaatatggttcattaatttaggttttctaacatctactttgggtgacgtagcctccagtgaggtcagttaagtgggacagaaaccgcagagggaagaggtctttgcttcccctgggcccattctccctggctgccagcccttgaagtcagaacaccatgggaaaattcaggagtcggcacttgtagccgtcaagtggtgctactttccacattcaattagcgaggccccagaaaacttgaaacaggaagtccggcactaccaacatgccgccactcatacaactcaactcttcctccaaactcgattcaaagagcaatacacagagcgtcagacaaaggaacacaggacaaggcttgaaacatacaatcctggagaggcagacgagggcccaatggggccaaagggtagctgggcgaggaggcagctgaagcagcggtgggcatcctgcctgctccaagagcttctcccttcacccctggctctgccaggctaacagtcttgagccaccaagctctgaggggccaaactggcagagggttggagatgaaacattgattcaggcttggcaggaagaaaacggcaggagcagcacccactggggtctccaaggcaaagctagattcaagggcatttaaaaaggagggaatcctgcaaggaaccggtgagggacacagcagcaagaaatggggaaacagagtccccagaagggaccagaggaagagaaccacttctcacagctaagccaagcaagataaagctttacggatagcccatttcccaaatcccatcaggtgcacaccaccgatccaggcgggctggaccctgccccctccagcgacgacggctctcggggaaaggtggaaggggcgcctgcctaagggtgcgctaagcgggagtcagggcagcggacactatgtacaggtgtttccttagttctccagcctccccagtggaactgttcaagtagaggtcccgggctttggccctccgcatcctgcttccccttccctgaggcttgtgcttcctccagaagggaaagggccccagggctgccactgccccctggcggctgaagccagagatccggggtaggtttgctttacgcagctggaagggtccaaggctctttctagcacgtgccaaggtccagatttagggaaggggtggggggaacagggacaggggacaaaggctactttttgcgggtgtgctgccttcgggcctgcagtcgctgtcgagcccctggggtcttggatcccgcaccaatggaaaatgaaggggccgctgatcctggaaagattcaacaagacctcatcagggcagctgctacctgagactctggctctgggtgcccaaatctctggaaggccaggccagtaataaaacacagggtgcctcaatagggctttccccgctgcgtcagaaacactggacgggaggagcctcctgaaatgcaaactcccagagtctcagagcgaggcccacgaatccatttttacctggcttcccatgggaggcaaacttccaccccggacagctcctctctgatctctgccatccaactcccatccctgggctgtgctgtactcctaacccgaaatgtctttcctgtgctgaacctgatcttcacggggcctcagagggccaggagcctgccaccccacccaacctctcctcagacagacgagcagggccacagggtggcttgctgcttaccgaacggtccaacaccaacaaagccttgggcgggtgctgaagatgccccaaaggagaggctgctgcccgatgtgcccactccaggcgcaggggtgttctgaccaaaggtgggggtggcggtgcctggaatgaagagaacagagagctggccagtgagcagagggcggaggcaggcgaggagccgggcaggagcctgtgctctgcagggcacttcccacgggaccctcagccccagttctgcttctggggcactcctccatcagcagctgagccagacaaccgagtcttcatgcctggtgccccagctcagcctgcttctcccacccgctaatggccacgccagggcagagaaaaagcccccctgccccgcagccacctcgtgggcctcctgaccatcgctgcagaggggagtactctggggcccccgcctcctagcgtacctgggttggctacctcctctgttcaggccttttccccctagccaccgtcccctcccctctgaagcctggtttgtccgtcctgtgtcttttgtgatgccccgtggtcccctcccttccccggccttgccctgactggctctggctgcctgcccgatgccctctctggcagcccctctgcagggatggctgctctcagggcttggcctccggcccggacaaggggaagctccctgtgctcccacgctgcttccacacagtttctcttccttccctaaataccgtaactcaggttcaaatcactttaatctgccatgtcctcatgtcacctgtcaactgccaggtcactccctgattcacagaggacccttggctcactggcttcctccccatcaccactcacggtgacttcgccctgtggggctgactgatggtcctctcagcccctcggccctgccacccccatgacctcctctccccgacccctgccaccactcctgcagccacactgtcaccacaactgctccggctcccgaatctcctgcaggcaccacccctcctgcagctgacttcacccgctctccactcctgcaccccctgagctgcatcggggcactgacccgctgcccctcctgctgtgcttgctggggtctccacagccgggtggcaccagctgtccgctgaccttagatctatacccagtgtcgctgggaaacacacgccatgctaactggcctcactttaacttcacaatcacagttttccagcccacaaactgcctggaaactgatcacactttttaatatgatgttcctttcccccactgtccaaaatgactatttcaaaagaccccttttttatacactttatcccgaccttccctctcccagattttctctcctacttcacgaagcaaacagaagccatgggatctacattcatcttccacacgggaggaaccatcactgcatccttctgcctgattctgcaatggttttcctgaacacttaagacccaaacacccaaccctggccacaaacaatcctcgcctcttggcctccttccacaccactgctttagctcctgccctcctgccatgcttgtctttgttctgctcttcaacataccaaacatgtttctgcctctgggcctttgcatgcgccatcctgggcctgaaaggcatgtccacttgtgctgtgcccacccccaccccacccccatattcagcttacgcttgagacagtcttgctctgtcacctaggccagagtacagtgtggcatgatcttcgctcactgccacctccacctcctgggttgaaacattcttctgcctcagcctcccgagcagctgggattacaggtgggtaccaccatgcccggctaattttttggtatttttagtagagacagggtttcgccaagttgcccaggctggtcttgaactcctgtcctcaagtgatccaccctccttggcctcccaaaatattgggattacaagcatgagccactgcgcccaaccttcagcttacaattgttaagtactcagaaggcctttgaccagttaaatccacaatggctcctccagtcattactacgttagcaaaacatgtatcatgccctggcatctcactgagttctatattcagtgcctgtctcttcactgccacagcataagctccccgagaccacaggcttcacaggcacagcttttcagtgtccggcccggtagcccaagtccacgcccctccttacctccaaacacaggtttgctctcagttgtgctgcccacgttgaaggcaaacggtgtgctctggccggtggtgcccagggcgttctgacctaagccccctgcgaagggggtggaggtggctgtgctcccactctgtcctgctccaaagctgaaagctccggtggtggcgctggagcctggggtggccacgttgatcccaaagctcccactgccagcgggggctgccgaacccccaaacgtgaagggtgatggtgttgtgctgccaaacaccgagctgctgctcccgctgctggcggtctgggtggtggctccaaagccggagctggtggctgcaccgaaggagaagacagcagtggagccgccaaaggcgggctgtgagctggcgggagcgccgaaggccgaagccgtggctttcaacccaaacgccgagtgcgtggcaccgccaaaggtaggctggatgggcgtaggcacgtgcgcaggcacgatcttgatcgtggacgcaggtgcaggtgtgggtgcagtagccggggccggggctgcagagtttccaaaagtgaaagagctgccaaagctgggggtaagggctggcttggcggcccccggtggctgcccctcagcggccccaaatgcgggctgggggttggctcccggatatgatgggagcggggacttggcgcttgagccaaagggaatgttgaacgtgggggtgctcgtgttactgaacgtcagagtgggctggctgctggtggccggggcggaggtggcgagggtgctgccaaaaccactaaagtcggcagcgctgctgctggtggccgttggcacggcagtgggcagggactggctgaaggtggtgactgtggtggttgtgggcaaggcaggaggtttgccaaactggaatatggagcccatggccggggtgaagctggcagcagaggcctggggcgccccgaagaggaaaggctgtgaggcggcagtggcggtgctggtcgtggtactcacactgctgctgctcacactgtttatgccaaagccaaacgcaggcttcgaagcagagtctgtggatggactggcagaggtgatgggagccacagcagaggtggcgctggccaggccagtgaagagcggggcagttgtggtgggagcagtggcgggagtagttgtctgcttgaagaagggagcaggcaagggcacagatgcaggtggccccatgctgctaaagacaggctggaaggtcggggctgtggtgctggtggtcgtggggagggaggagctggagggtgctgtggctgagactgaagggccaggcggtgtgaggccttccttctcactcttgggtggagccgtgaaaatgggcttgaacatgggagatgctgaagatgcagcaggggcggcagggctggaaggtgaggtgttctgtgttccaaacaggaagctttgcttgggggcgggggacggggcagatgtggcttggggtttggtagccgtctctgcttgaagggttggaggtgccttggtgtcagtggctggtaccatggatggagcagggatcagccccagcaaagtggtcgggggtttggagtcaaaggaggggctggggagcagccctggcggccctgactgtgataaacccagcgggggtaggaggctgggtgtctttggaggtgagagggcctcagtggttgctgctccagcagattctggaagaagaatagaaaatgtgaaattggaataaacacttcaaagatgatggtattcagtatttcagcgtcctccccatgcctaccacagagcctgggatccaagagtcagtcaataaactcagctaagtctacactacaggcctgtacagtaaatcaaggaagtgttcattatttccacctcacagatcatcagacagaaggggataaaatggggcctaaatgggggcctaatgtgtagagactaagacagtccaattgtctgaactctgaagttcacgtatgaatctagatatactttatttgcctactaagctcacctgccaggcgctaagagcacacaactatgaatggggaagtctctgcccttgagcagggagggtgcgtacgaaccccaggttaccgtctgataaagaggtgtgcgcgcgcagtgccgtgaaggcctgggccgggaacaccagcagccctcaaagtgctggagggaaaggaagcagtgttgttctggaccagtagttctgacaggcaaggatatcctgaccacgccaccacattcacacttcagaggtgctgcaccgggaagatcattctcatctgacagatgaggaaggcgaggctcagggcagctaagccaggcttcagatcctgagcgtcgcagcaccccttctctaacacttcctgatgtgggctccggcgctgttaaacgtaggcccgctccggtgtgctgagccagggtgcgttcggcctgcagagcaatctccagcgactgacaggcacgacgcccttattccaacccaagccggggatgctgctcagaaggctggatccacggccccactccagctcacctgggcagggtggcaggctcgggggagtctgcatcttcttcaagctctctaacagtgggttggtgcttggggccaggagggaggtgggtggggaggcagttgcagcagcaggcagggtaaaggtaaatgaaggctgagtggtagttggggtctcagtgacagagttcgaggcagcatctaagaaagaaagaaaggtgaagcagtcctggcttgtctgggacttctttccacatgcctgtcggagagcaggctctcagcacagctcatggaggaatgtctgccctaaattgcagtggtccctgctgtccagttcccgtgaagaccaacacggatatctcaggtgagaaagaccacaagaaaacatggaactctacttcggattttcccagagaaacccatttttccaaacaccaaaataaaaccaaagaaaacagacacctgaaacctctcgagagtgcaacgatctgtgctccttaccactcttgtcctccaaggcctggttgaaccactgtaatgaagccttcttctctaagtctaggtcctcggcagtgatcgaatagccaagctggggaggtggaggctaccaaagagaaaaagaagaagtcaggccaatcagaaaaaacgggaaggctgggcgtggtggctaacgccggtaatctcagcactctgggaggccaagccagctggatcacttgaggtcaggagtttgaggctggcctggccaacatggtgaaaccccatctctactaaaaatacaaaaaattagtcaggcgtggtagcaagcgcctgtaatcccagctacttgggaggctgaggcaggagaattgcttgaactcaggaggcagaggttacggttagccaaaatcgagccactgaactccagcctgggtgacagagggatgttgtctcaaaaaacaaaaacaaaaataagttagaaaaaaaaccagaagaaacttgtccttagcgttcctaagacttaggagagctaagccggggagggcaggagtagatggacaagaccataccaaggtcagctgttcccctcgccgagaaggcagcagctgaactttccgcttacgctgcccagagctgccaggtgtagactgagaattcgagttttgtttcttccttggggttgtatctgcagctaaagaaagaaatcaagactcgtttgcttccttccctcttccagaaatggatggttgtgtctacccacttcgcatttcacactgagttttcaatgatggtatctctgaaaagattcaatcttctatggtttggttgcttggatggtgtttgtaagattaaggcgcgcacacaaaccgcttactgtgcagtaattactgggatcacccacaggtgactcaaactgagcttacctctatccaatcgttagcccccatctgtagcctttctccctcatcagactataaacttctgaaggagaggaaatctctctctttgtatctaacatgccttagacatagcaatgctcaagaccttttttcaataggtattaatctctacatcctccacaaatacctccaccaccaacagcagcccctcctcctggctcagcaacctacccttttctccctgggactccttgtctgctgccaatggagttgaagaactggaatgatgacacagctcttcttctctgttgggaaaaaaggaacaatttagtctagaaagacttcttggctgaagtattaaataatttctcacaccctcctaactaccaagtggccaacatctaaaacaaccatcatttaagatctcagtatgccaggataaaaaaagtcaacaggaaattccaacagaatgaagggaggctgttcacagaggccatgaagacagtttttgtcttaaaacaagcacaaacaataatcttcaaaccttacttacaacctaccaagtccctgggagttctagacacagatgtgatccctgagggagtggcattccagccaactgcaagcacctaggggatcagctcgagtcaagaacctgaaggcgactgcccgctgacttgactctctctgctctccactctgcatggcctctgtgcttgcacccgatccctcatgctggagtgggaggcgacagccagaggccactggagtcagtatccaagactgtagggatgatagttgttcaggtgggtgctgcattgtccctctcagggacttagtttctttgattctccaagtcacagcagcacaaagcctaagagccaggttcgtttcccacctttcctcacccccttctgtccacgtagcaaatgaaaactgcaggagaatgccgaataccttattttctttgctggcctctccggtgtctgggagcgggatgaggctgggctagagaagggtgatgaactggggccatttctcttccagagctaaaaatcaagagggacatgactgagcctgctgataacttagcatctgaccctcaacatgacaaagtctctttttaagtgactaaaaaaatattttttatggttaaatggttagtcatgcctgtaatcccagcatgctgggaggccaaggtgggaggattgcttgagcccaggagtttgagaccagcctgggtaacatagcgagacccccgtctctacaaaaaattgaaaaatcagttgggtgtggtggtttgcatctgtggtcccaactactcaggaggctgcagtgagctgagattgccccactgcactccagcctgggtgacagagtgagaccctgtctcaaaaaaaaaaaaaaaaaaaaaaaaaatagaaaatgaaaatgaaaaaaatttgtttgtgaagaaagacccctgaaaagaaagtcaactgccagtattaattatgaaagcaaaaaaagaaaagtctataaaagtaatggaatgtgaataaaggtagaagggatggacacacttttgcatatattagcctcagtaatgaagagccaggacacattcaaacctgtgccagactgtctacggaaaggatacaagtaaattaaagaagacaacccagtaaactaatttagtcttgcttccattaaattttcgatttttcatttagtaacttcattttaaaaatacgctgtcatggccaggcgtggtggctcacgcctgtaatcccagcactttgggaggccaaggggggtggatcacgaggtcaggagatggagaccatcttggctaacacagtgaaatcccatctctactaaaaatacaaaaaaatacaaaaaattagctgggcgtggtggcgggtgcttgtagtcccagctactcgggaggctgaggcaggagaatggcgtaaacctggggggcggagcttgaagtgagccaagatcgtgccactgcactccagcctgggtgacagagtgagactctgtctcaaaaagaaacaaaaaacaaaaacaaaaacaaaaaaagcactgtcataatatttatgacttttgcaacaacgatggcatttatcatcatgtgatgattatccatacatctgcctcttccaccaggtgagttcttgacagcaaagatggtgttttcatctctgcttcctccacagaccagcagcaaagtagatggcacagagcggacactgcaaatagtctcgtaagtgctgagcctaattacaaagccactaaactgtcacctcagaccgtctttcctacttgaaaagctgctagtgatttcttacccagtaccagctacatcatataagtataaacaggaagccaacaagcttaataagtacaaacaggaagccaagcttaataagagttcaaaaagggaaaagaggaagcttcagacaagtgg

SEQ ID NO: 1792 - protein, 1079 aa, Homo sapiens [sequence omitted]

SEQ ID NO: 1793 - DNA, 1090 bp, Homo sapiens
  source
  (1)..(1090)
  CDS (201)..(890)
ttcggttcttctggggtgttgatgctcctaaagcccgagagcacgtgtccagaccctagcctgtacgacgctgactctgcccggtcccagaaccaaagccatgccggggtgtggcctctgaccccacgcggaggggacctcgccttgcgggaccccacctggaacccgacctcccagcctcgcagccggcctgagccgccatgcgcgggaagttgctgccgctggccggcctctacctggtgcagggcctgccctacgggctccagtccggcctcctgccagtgctgctgcgtgccggcggcctctcgctgacgcgcgtggggctggccaaggttctgtacgctccgtggctgctcaagctggcttgggccccgctggtggacgcgcagggctcggcgagggcctgggtgacgcgcagcacggcgggcctgggcctggtgtgtgggctgcttgccgggctgccccctcctggagctggccaggccgggctgcccgccgctgtggcggggttgctgctgttgttgaacctgggtgccgccatgcaggatgtggccctggacgcgctggctgtgcagctgctggagccggccgaactggggccgggcaataccgtgcaggtggtcgcgtacaagctgggggccgcgctagctgggggcgcgctgctggcgctgctgcccaccttctcgtggccgcaactctttctgctcctggctgccacctactggctggccgcggccctggcctgggctgcaccagccctgcggcggctcccacagcagcccccttccgagcagcgtccccacaccgcgcaccttctgcgggacgtgctagccgtgccggggaccgtgtggacggcaggctttgtgctcacctacaagctgggtgagtgaggcctcgagccaggcaacagcagttggggcttccgggacagctccaggtgtgtccccaggggcttgcaacccattacagggccacgctctttctggggtatgacctgcaagacttggccctgacatccggggctctgcagctgggccttgtgtcttgtccgcccccagctctagccccatccctgagcgctctctcgggc

SEQ ID NO: 1794 - protein, 229 aa, Homo sapiens
MRGKLLPLAGLYLVQGLPYGLQSGLLPVLLRAGGLSLTRVGLAKVLYAPWLLKLAWAPLVDAQGSARAWVTRSTAGLGLVCGLLAGLPPPGAGQAGLPAAVAGLLLLLNLGAAMQDVALDALAVQLLEPAELGPGNTVQVVAYKLGAALAGGALLALLPTFSWPQLFLLLAATYWLAAALAWAAPALRRLPQQPPSEQRPHTAHLLRDVLAVPGTVWTAGFVLTYKLGE

SEQ ID NO: 1795 - DNA, 1294 bp, Homo sapiens
  source
  (1)..(1294)
  CDS (201)..(1094)
aataagcgtctagatgatgtaaacaatgaaaatatttacagtcaattcacattaaaaaatatttctgatagttttgctgttcacgattcttcggtatgtcattatgtatcaccaattaaaaaaattaataatgatcaagtagatttacttggtgagcgttggatgattttaattgactactctttaacgaaacaaaaaatatgataaataaccttatattttctttattgcctattctcttatctttaatacttggatggggaattgggcgagtaataaattcaaatactagagataatttagtaagttatataacattcttagtctggttacttctaatttcaataggtttccaatttggtagtattctttttgataaagaactaggaactacagtaattgtcggatcatttatttattcaacaattattacttttattacttttattttactttttaaaaaagtaaaaaatacaagtaaaaataagaaatctatatctgaaatttttaaacctatcaaagagtgtgtgattgctatatcaatggttattattggtatggttttgtatcttgtattgccgagtaattgggagagtgaggctgtaagtagtattcttctttatatcttgatatttttggtaggtgtggatttatcaacaattaaaattcaagctttgaccattaatcattttcaagtaccactaattacaattttttcactattcattgctgcatatttaacaacattcattatagataaatcattttttgaacttttagttttaggaagcggatttggctggttttctctttcaggtccactcataggaaaaacattaggtgctgaatatggaacttttgccttattaactgatttaattagagagttttatgcaataggtttgctatatcttcttggacgaaattatcctaatcctataattggtatttgtggagctacagcaatggattctacacttccatttataaaaaataattgttcgcaattggacgtgcaaatagcaatttttagcggttttattttgacaatactagcacccttttttattatattttttagtgtttttatttaaaatattattttaggcagtgatttacttaacttgattattaaatttttctaaaatcaacataatacacgttatacgaaatgtgttatatttcttgtgaaatttcaacgctatagtttcaattttatagcccgagcatcccagttcgggcttttttatgctttttcacgttccacggctaatctttgatcaatattccacgt

SEQ ID NO: 1796 - protein, 297 aa, Homo sapiens
MINNLIFSLLPILLSLILGWGIGRVINSNTRDNLVSYITFLVWLLLISIGFQFGSILFDKELGTTVIVGSFIYSTIITFITFILLFKKVKNTSKNKKSISEIFKPIKECVIAISMVIIGMVLYLVLPSNWESEAVSSILLYILIFLVGVDLSTIKIQALTINHFQVPLITIFSLFIAAYLTTFIIDKSFFELLVLGSGFGWFSLSGPLIGKTLGAEYGTFALLTDLIREFYAIGLLYLLGRNYPNPIIGICGATAMDSTLPFIKNNCSQLDVQIAIFSGFILTILAPFFIIFFSVFI

SEQ ID NO: 1797 - DNA, 2047 bp, Homo sapiens
  source
  (1)..(2047)
  CDS (201)..(1847)
  modified_base (239)..(338): a, t, c, g, unknown or other
ccgcatgagccctgagcctgcatgtcagggaggagttgtctgtgagactcctcagggtggctccggggaggtctgggccttcgtttccctctgcagactgcgggggatgatggcgacctgggccagcccttccagttagggccctgcggcttgcctatggagaaaaggggaggtctccctcccaggccgcttggtgggtgatgtctcaaacaggcgggaagacagagagagagacagannnnnnnnnnnnnnnnnnnnnnnnnnnnnnnnnnnnnnnnnnnnnnnnnnnnnnnnnnnnnnnnnnnnnnnnnnnnnnnnnnnnnnnnnnnnnnnnnnnnggacgcgtgtcacatgtgcacatgcctgtgtgtaggatgcgtgtgtacgtgtgtgctggggatgcgtgtcacgtgtgcacatgcctgtgtgggggatgtgtgtgcacgtgtgtgcctggggacgcgtgtcacgtgtgcacatgcctgtgtgtgtggggatgtgtgtgcacgtgtgtgcctggggacgcatgtcacgtgtgcacatgcctgtgtgtggggggatgcgtgtgcacctgtgtgcctggggacccatgtcacgtgtgcacatgcctgtgtgtggggggatgcgtgtgcacctgtgtgcctggggacccgtgtcacgtgtgcacatgcctgtgtgtggggggatgcgtgtgcacctgtatgcctggggacccgtgtcacgtgtgcacatgcctgtgtggggggggatgcgtgtgcacctgtgtgcctggggacgcatgtcacgtgtgcacatgcctgtgtgtgtggggatgcgtgtgcacctgtgtgcctggggacccgtgtgacgtgtgcacatgcctgtgtgtggggggatgcgtgtgcacctgtgtgcctggggacgcgtgtcacgtgtgcacatgcctgtgtgggggatgcgtgtgcacctatgtgcctagggacgcatgtcacgtgtgcacatacctgtgtgggggggatgcgtgtgcacgtgtgtgcctggggacgcgtgtcacgtgtgcacatgcctgtgtgtgtggggatgcgtgtgcacctgtgtgcctggggacccgtgtcacgtgtgcacatgcctgtgtgtgtggggatgcgtgtgcacctgtgtgcctggggacccgtgtgacgtgtgcacatgcctgtgtgtggggggatgcatgtgcacctgtgtgcctggggacccgtgtgacgtgtgcacatgcctgtgtgtgtgggatgcgtgtgcacctgtgtgcctgggacccagaggtgaaatcacaaccacctgaggtccccagcaccacctgcccccgagctccagcccaggcaccttgccttgctttcatcccagaaaggggtgactgcaggccggggctgccctggtgcaaggatttcatcctagtacccatggccatcaggggaggcagctggggccagaaatgggcacccagggaccaggaggagccctctgcgctatgccttcagccctgcctaaagggcatccccagggaggcaggcttctctgtccaagccccagccagagcacagcacagactgttctggtccaatccagccccccacccccacaatttgagggcaaagaatgaaggcctcctgacgggggctgggcatttgccacgaagcctcattaacttggacactgtcctcattccacagggcagcacagcccctcaatgttggaaaacggtggcagagcctcagatacctgccgggagttggaggactgggatctgtcccatcccgtggctctgggctcacacagggtcccagccacagccctggcagcctgggcttgattccatcttcttccaatgagaagaatgtgttccttcctgctgacctgcgggattggaaatgcaagtgaaatcgctgttccgacgcacaggttgtccacattattaataatagatggccagtgggtgaattattttcagtgggggattattttcagtgggggaattatttcaaccatcccacccaacgtgcaacctcgggccagaactggtccaggaatg

SEQ ID NO: 1798 - protein, 548 aa, Homo sapiens
  MOD_RES (13)..(46): Variable amino acid
MSQTGGKTERETXXXXXXXXXXXXXXXXXXXXXXXXXXXXXXXXXXGRVSHVHMPVCRMRVYVCAGDACHVCTCLCGGCVCTCVPGDACHVCTCLCVWGCVCTCVPGDACHVCTCLCVGGCVCTCVPGDPCHVCTCLCVGGCVCTCVPGDPCHVCTCLCVGGCVCTCMPGDPCHVCTCLCGGGCVCTCVPGDACHVCTCLCVWGCVCTCVPGDPCDVCTCLCVGGCVCTCVPGDACHVCTCLCGGCVCTYVPRDACHVCTYLCGGDACARVCLGTRVTCAHACVCGDACAPVCLGTRVTCAHACVCGDACAPVCLGTRVTCAHACVWGDACAPVCLGTRVTCAHACVCGMRVHLCAWDPEVKSQPPEVPSTTCPRAPAQAPCLAFIPERGDCRPGLPWCKDFILVPMAIRGGSWGQKWAPRDQEEPSALCLQPCLKGIPREAGFSVQAPARAQHRLFWSNPAPHPHNLRAKNEGLLTGAGHLPRSLINLDTVLIPQGSTAPQCWKTVAEPQIPAGSWRTGICPIPWLWAHTGSQPQPWQPGLDSIFFQ

SEQ ID NO: 1799 - DNA, 1588 bp, Homo sapiens
  source
  (1)..(1588)
  CDS (201)..(1388)
actaaaaatacaaaaacattggccgggtgtggtggcaggcacctgtagtcccagctactcaggaggccgaggcaggaaaatggcgtgaacccaggaggcagagcttccagtgagtcgagaccgtgccactgcactccaacctgggcgacagagcgagagtccgtctaaaaaaaattaaattaaattaaaattttttaaaaatgaagaaacaaccagagaatggaagcaagtatttgcaaactatgcatcagacaacggattcatccacaaaatatataaagaattcaaactactcaaaagaaaaaatacaaacgatcttattaaaaaaatctacccaaaacctttgtcccccaccattatttccctacaccttcttttcccgaccacctttgaccccctccctctggccaccctttttcttcctccatctgcccccaaacttcttcaccatttttctccaccatcatttcacaaagccttctctactctcctgctcaacacccttttccccatccaccgacccaaaccctttccccactgtttcttcccaccgtcttttcctcttatccctggccaccctctttttacccctcccgcatcacactcttttgctccttcatctaagcaaaaacattttcccccgccttttcccaaaaccttctccccactcctgctgctcaccaccgtcttttcccccttcatccacccaaaaactgtgttcttcatcgtctttccccccgttcctccttgccatttctctttcccttctccatctacccaaaaacatttcccccatcttttcacaaagccttctccccactgctgctcatcttcctctttcccccctccatccaccccccaaaactttccccaccatcttttcaaagtctcccccctttaccactcgtgctcttctttccccaatcctgcttgccatcctcttttttgtcctgtatctaccccaaactattttcccgtcgttttcccaaccctctaatccctgctccctctccccaccctctttcctcctcctcgtcactctctcccccctccatctatcgaaacactttttacccaccggctttctgcaaaaccttccctccctcccgctccccaccctgtttttccgcctccatgtacccaaaaacttttttccccaccatcttttcgccgccatctttttgcaaccccttctcctgctaagctatcctttttttccctttggcattaactaccctctttacccccctacaactatcccaaaactgttttccttcttctacctctccagccgcgccatctccatcgctgccaacaaccgcagcgacgcaagccacgctcccgcgtctccagcctccagcatatggccagtgactcccgattcctagtcctctacgccgggatgcgaccacctcgacacgtcagtacgggaacctgaaaagaccagatttcttttcagcatcatttatatactgccgttatgcccacggaggatcctggactgcatgtattgattggatgagaaaaaaacctccaggcttactctgattggacttcatgatcatgttctgattggatgagagcaagt

SEQ ID NO: 1800 - protein, 395 aa, Homo sapiens [sequence omitted]

SEQ ID NO: 1801 - DNA, 1459 bp, Homo sapiens
  source
  (1)..(1459)
  CDS (201)..(1259)
  modified_base (1139)..(1238): a, t, c, g, unknown or other
gattcatgctctcacccttctgcatacaaaattttcatgatacgatcttactactgtaacagtttatttgtctatcgtcccgtgttttgggcgattgagtccttgctctcttcactcaggtctgctcagttgcatcgggttcgcgtatctcgagctcatctgtctagtctctccgtctattctcatgggtctcctctgcgatgtacctgctccctgcctctcctagcctcttcctccggtgctcgccgtgggttctcccctcgacctcgtgctttccttcctttctgtctctgcttctctcggttgttcgccttctggcagtcctcgtcttatgttctttttgtgttctttcgctccctgctcatctgtcgcccttgccctcgagtcttccactcgcactcctatcctccttccgtcgctccctctctactcttcctgctctcttctcttccttctctctctccttctctccttttcttcctttctttccccttgctcctgcctctgtttctcttatctctctcgcttacgctctccccagcggacgctgtttgccctctccttgcttcgtctctttcgctttctacctcctctctctgtctctctctcgcgcctctctgctttctaccctgtccgttcatccgctctccctgtttgtgccccgtaatctcttgtctcttcccttctctttgttgttcgttcgtcattctctcgttcttcccgttctctcgctcctccctctcttctcttcctgctctccctctccgccctctctgtcatggtcttctcctactttctcttcgtgttcctctctgcctcctttgcctccttgctttgcgctccatcccgtcgtcgctcgcctcgttctctccttctgtcttgcttcctgtctttctccgtcttctcctctctcgcctttctcgtcctcttttccctctttctgtcctcccttctccttgctctttcttccttttcctctttcctcgttcgctttctgtctcctccttcctgtcttttctcttcttttctctcccgtgtgtcccctgttctctgctctccggcttctcggcggctcgcgttgttttctctacgtctgccctcctgtctctgttgtccgtcctggcgctccggttcccttnnnnnnnnnnnnnnnnnnnnnnnnnnnnnnnnnnnnnnnnnnnnnnnnnnnnnnnnnnnnnnnnnnnnnnnnnnnnnnnnnnnnnnnnnnnnnnnnnnnntgtggtgcctcatgctcgtaatcccagcactttgggagattgaggcgggtggatcacctgaggtcaggagttcgagaccagcccagccaacatggtgaaacccagtctctattaaaaatacaaaaattagccaggcttggtggcatacacctgtagtctcagctactcaggaggctgaggcaggagaatttcttgaacccgggaggtggaggttgcagtga

SEQ ID NO: 1802 - protein, 352 aa, Homo sapiens
  MOD_RES (313)..(346): Variable amino acid
MYLLPASPSLFLRCSPWVLPSTSCFPSFLSLLLSVVRLLAVLVLCSFCVLSLPAHLSPLPSSLPLALLSSFRRSLSTLPALFSSFSLSFSPFLPFFPLAPASVSLISLAYALPSGRCLPSPCFVSFAFYLLSLSLSRASLLSTLSVHPLSLFVPRNLLSLPFSLLFVRHSLVLPVLSLLPLFSSCSPSPPSLSWSSPTFSSCSSLPPLPPCFALHPVVARLVLSFCLASCLSPSSPLSPFSSSFPSFCPPFSLLFLPFPLSSFAFCLLLPVFSLLFSPVCPLFSALRLLGGSRCFLYVCPPVSVVRPGAPVPXXXXXXXXXXXXXXXXXXXXXXXXXXXXXXXXXXCGASCS

SEQ ID NO: 1803 - DNA, 1069 bp, Homo sapiens
  source
  (1)..(1069)
  CDS (201)..(869)
attataattaatttactattccctcattttttgatatttagtacttttaaaataatgtttaattacaaattgtaatttaaaaacaaatattaatttcatttaatatgcatttcttcatttgaatttacagaactgggtttataggcccaaaaggtcaacgaattttcctcattctcagaggagtccttggttctaccgccatgatgcttatatactatgcttaccagacaatgtccctcgctgatgccacagttatcacgtttagcagtccagtgtttacgtccatatttgcttggatatgtctcaaggaaaaatatagcccttgggatgctcttttcaccgtgttcacaatcactggagtgatccttatcgtgagaccaccatttttgtttggttccgacacttcggggatggaagaaagctattcaggccaccttaagggaacattcgcagcaattggaagtgccgtatttgctgcatcgactctagttatcctaagaaaaatgggaaaatctgtggactactttctgagcatttggtattatgtagtacttggcctcgttgaaagtgtcatcatcctctctgtattaggagagtggagtctgccttactgtgggttggacaggctatttctcatattcattgggctctttggtttggggggtcagatatttatcacaaaagcacttcaaatagaaaaagcagggccagtagcaataatgaagacaatggatgtggtctttgcttttatctttcagattattttctttaataatgtgccaacgtggtggacagtgggtggtgctctctgcgtagtagccagtaatgttggagcggccattcgtaaatggtaccaaagttccaaatgaagcatcattgctgaaatacatatttttttcaagtacaccatcacctaattcacatacagcatacgcacacatctggaaaatctgcattttcttcattggttgtatttaataaattgcctaaagtaccatttttgaatatagtatgtctttagttaagaatagctagtctgtttggtgtaacaattttttggtagctttgg

SEQ ID NO: 1804 - protein, 222 aa, Homo sapiens [sequence omitted]

SEQ ID NO: 1805 - DNA, 1369 bp, Homo sapiens
  source
  (1)..(1369)
  CDS (201)..(1169)
  modified_base (958)..(1057): a, t, c, g, unknown or other
gtcagatgtgaggcatagcatgaatgaaaggtaaatagcatgagtattagaaagtagatgaggaagtttaataattttaatgtgcttcataagctctcatggactttcacgtatcaattagtaaaagacgtaactaagtgatctggctttcagtctcctagttctctacagtgtaccctcagttttccacgtgcttacacatgcctacatttgtactgagagaaaaggaaatagttttttttttttttttgagacagtcttgctctgttgcccaggctggcgtgcgctcggccggcctcgtcctcgctctgtctctctctccctctgtctgttctcccgcgggctctctcctctgctcctcctttctcctccggttctgcgctcctctcccgctctgctgtctctccgtcggtgcttttctgtgtcttccttgtcgtctctgctctcctcgtcccttctcctgttgcttctctcctctctactgttctgtcgctctgtccgctcctcctcgtcctccccgctgtgcctgtctcggcgtcgttttccgctctcgtgccttccctgcgctctctctctgtcggctcctcgtcctcctctcggtcgcttctgtcgctctccgtctcctctttcctctcgtctctttcgctgctgcgttatgcgtctttggcctcttctctgtgtcctgctgtgtttcgggtgtctcctctgctgctccgtgtcggtctgttgtctcattcatgcgtcggctgtcttcgcggtcgctccgctcgttcgtctcgccgcctcctctcctccgtcggcggtccttctgtgttgccgccgtctcgcggtcctgtgcccgttgcggtgcgctgccctcgtctcgcctctgctccctcgccctctctctgtccctgcccgctggctctctctcccctccgcgctgtcttccggttgtcgtctgctgtgtcttctcgtnnnnnnnnnnnnnnnnnnnnnnnnnnnnnnnnnnnnnnnnnnnnnnnnnnnnnnnnnnnnnnnnnnnnnnnnnnnnnnnnnnnnnnnnnnnnnnnnnnnnccatggcgcggtccttccgccccgtggggaagacctgaggaaggcagcggggagacccaggctgcagcaacaaagggcagcgagcgattggccgggctgcaggcgaggttagccggggacccgggtggccggaggcagcggcgagcggtgcacgtgcttgcagacacgggcgagtgtggagccggggggtgcacgcccggtgggtaggggcttgctcccccgaggcatgggatggcgaggaggctgcagcgacatcgttctgcctgcacccggcctggggctggcagggtaggggtgtgttggggggggaag

SEQ ID NO: 1806 - protein, 322 aa, Homo sapiens
  MOD_RES (253)..(286): Variable amino acid
MPTFVLREKEIVFFFFLRQSCSVAQAGVRSAGLVLALSLSPSVCSPAGSLLCSSFLLRFCAPLPLCCLSVGAFLCLPCRLCSPRPFSCCFSPLYCSVALSAPPRPPRCACLGVVFRSRAFPALSLCRLLVLLSVASVALRLLFPLVSFAAALCVFGLFSVSCCVSGVSSAAPCRSVVSFMRRLSSRSLRSFVSPPPLLRRRSFCVAAVSRSCARCGALPSSRLCSLALSLSLPAGSLSPPRCLPVVVCCVFSXXXXXXXXXXXXXXXXXXXXXXXXXXXXXXXXXXHGAVLPPRGEDLRKAAGRPRLQQQRAASDWPGCRRG

SEQ ID NO: 1807 - DNA, 1627 bp, Homo sapiens
  source
  (1)..(1627)
  CDS (201)..(1427)
  modified_base (1150)..(1249): a, t, c, g, unknown or other
gattctcctctctcagcctcccgagtagctgggattacaggcacctgccatcatgcccggctaatttttgtattttagtagagacagggtttcaccatgttggccaggctgatcttgaactcctgacctcaagtgatccgcccacctaggcctcccaaagtgctaggattacaagcgtgagccactgcacccagtatttcatgttccatttcatatttatttcatcatttcatctccttcatttcatttcaaaacggagtctcactctatcacccaggctggagtgcatcaccacagccagcatttcattattcatttcatttcattatttcttcatttcatttcatttcacccggcatttcattattcattatttcatttcttcatttcatttcatcccatttgagacagagactcgctctatcacccaggctggagtgtgccactgcacctggcatttcattattcatttcattatttcatttcatcatttcatttatttcattttttcatttcatttcatttcacccggcatttcattattcatttcattatttcatttcatcatttcatttcatttcatttcgagacggagactccctctattgcccaggctggagtgcgccactgcacccagaatttcattattcatttcattatttcatttcatcatttcatttgatcatttcatttcatttcaagacagagactcgctctatcacccaggctggactgcgccaccacacctggcatttcattattcatttcacccagcatttcatatttcatctcatcatttctcatttcatttatttcatttcatttcaagacggagacgcgctctattgcccaggctggagtgtgccaccacacctggcatttcattttattatttcatttcagtattcatttatttcatttcttcatttcatttcatttcatttcacttcaagatggagactcgctctatcacccaggctggagtgcgccaccacacctggcatttcatatttcttcatttcatttattccattcccatattcccattcccattcaatttcaatccatttcatgacagagacttgctgcattgcccaggatggagtgcaccacacgcatttcataattcatttcattatttcatttcatnnnnnnnnnnnnnnnnnnnnnnnnnnnnnnnnnnnnnnnnnnnnnnnnnnnnnnnnnnnnnnnnnnnnnnnnnnnnnnnnnnnnnnnnnnnnnnnnnnnnttttttttgggggggtggggtgggtggagtttcgctcttgttgcccaggctggagtgcaatggtgtgatctcggctcaccacaacctctgcctcccgggttcaagagattctcctgcctcagcctcccaagtggctgggattacaggcatgtgccaccacgcccagctaattttgtagagtgagtctcaaaacaactgagggaaggcaaatctcaattctactaataggtctacacaatattagcactttttaaaaagcctgtaatattagcatgtgagatggatatgtctatagtgcttcaagtagttttcatctctgaaataattttaaaatcacagaatttaaagttacatgctggaaaggaccaatgaccttat

SEQ ID NO: 1808 - protein, 408 aa, Homo sapiens
  MOD_RES (317)..(350): Variable amino acid
MFHFIFISSFHLLHFISKRSLTLSPRLECITTASISLFISFHYFFISFHFTRHFIIHYFISSFHFIPFETETRSITQAGVCHCTWHFIIHFIISFHHFIYFIFSFHFISPGISLFISLFHFIISFHFISRRRLPLLPRLECATAPRISLFISLFHFIISFDHFISFQDRDSLYHPGWTAPPHLAFHYSFHPAFHISSHHFSFHLFHFISRRRRALLPRLECATTPGISFYYFISVFIYFISSFHFISFHFKMETRSITQAGVRHHTWHFIFLHFIYSIPIFPFPFNFNPFHDRDLLHCPGWSAPHAFHNSFHYFISXXXXXXXXXXXXXXXXXXXXXXXXXXXXXXXXXXFFWGGGVGGVSLLLPRLECNGVISAHHNLCLPGSRDSPASASQVAGITGMCHHAQLIL

SEQ ID NO: 1809 - DNA, 1285 bp, Homo sapiens
  source
  (1)..(1285)
  CDS (201)..(1085)
  modified_base (982)..(1081): a, t, c, g, unknown or other
tgataatgtagatattattcttgctcttattttttctgaatcatttgagaataagttgtagaggtcatgactccacttctaaatactaaatactgtgtctcctaaaaacaaccatcccttagataaccaaagtgcagtcattgaatttagaaaataacatctgatatgatactgttatttaatattgagtccatgttcaaatgttgccacttattatctggccacaatattattattattattatttatttatttatttttatttttattttttttttgagatggagtcttggtcttggtcgtccttgcccggctgttgctacttgctgctctcttatgtgtctctctcgtctcccttcttcttttctctcgcctcttgtgcctcttctgtgacctctcctattctatctcttctcttcgtcctgcttcccttctggtcgtgctctcgctcgtgtcgttccctctttctggtcgtgttgtgtgtgccatttctcgcgcgcgctctcctgccgcttcgcgctgctgttttggttgctcggtcgttctcgtctctcccgctgtctcggttttcttgtttgcgctttctctctctcttcttgctggtttcgtgttgtgtgctctttgtcccgtctcgtccgtcgcctcggcttcattttctgtttggtctgctttcctctctggctccccgtgctccctgtgttccgtgtggttcgtctctcttctcctcgtctgccgctcttctttctcttcgtttttgtctcgtgtctttctttctctccctcctcttcttccctctcgttcttgctcctctcctctcttctctccttgtgtccttcttcgctttcttctcttgcctctgtccttccgctgttcctgtcttctcctgctcccgctctttgtctgctttgtctttttcgtgctccctctactcgcgttcctgcttctggccgttgtgcggtcctgtcttctccgctcttccctnnnnnnnnnnnnnnnnnnnnnnnnnnnnnnnnnnnnnnnnnnnnnnnnnnnnnnnnnnnnnnnnnnnnnnnnnnnnnnnnnnnnnnnnnnnnnnnnnnnncggacgcgcgcggagagagaagagacagcgagagggcgaaaaaaacaagacggcaacaagagcaaaccggccagcgacgcaagagacagcagcacggggcacaggcgaggacgaaagcaggaccaacagacgcgccgcaacacacacagacgcgcacacaagcgagacagcggcggggagacgagcctcagacacgcccccgag

SEQ ID NO: 1810 - protein, 295 aa, Homo sapiens
  MOD_RES (261)..(294): Variable amino acid
MLPLIIWPQYYYYYYLFIYFYFYFFFEMESWSWSSLPGCCYLLLSYVSLSSPFFFSLASCASSVTSPILSLLFVLLPFWSCSRSCRSLFLVVLCVPFLARALLPLRAAVLVARSFSSLPLSRFSCLRFLSLFLLVSCCVLFVPSRPSPRLHFLFGLLSSLAPRAPCVPCGSSLFSSSAALLSLRFCLVSFFLSLLFFPLVLAPLLSSLLVSFFAFFSCLCPSAVPVFSCSRSLSALSFSCSLYSRSCFWPLCGPVFSALPXXXXXXXXXXXXXXXXXXXXXXXXXXXXXXXXXXG

SEQ ID NO: 1811 - DNA, 1399 bp, Homo sapiens
  source
  (1)..(1399)
  CDS (201)..(1199)
  modified_base (937)..(1036): a, t, c, g, unknown or other
  modified_base (1058)..(1058): a, t, c, g, unknown or other
tatttcgtgtctctggttctctggtctcttcggatatcgcttctgctgtgtcaggagccaggcgcccagtcatcgctcttgtgtccgctttttctagactctgtgtatatccttctctctttgtgcatgctctcctactcctctcccctctctcttctcccgcctctctgtgctttggtccgcgtgttctttagcttgtcatgtcagagggtctgccaggctccctgcggtcttttctggtctgcgcctgtcctcgtgcggttctccgtgtgcagctcctgctcgtgcttcgctggtgtctactctgtcgaggcgtgcccatggcgtcgctccgatcttgcctgtctctcccgttggtcgaccttctcacatccgtcgggtccgccgttctctccacgctgtccggtgctctttctcacctcggctcactcgtcctctggtgtgcctgtctgctgctctgtcgttccgtctgtttcgccctcgtacttcgcctcttgtgcaccgctctggctggcttcgccactgctgcgtgtccctccccgtgcctctctctcggctgtccctgcgccccggcgctcctgcccgtcggccccgtgcgctgtacccgtttcgttccttcgctgttgcctgtgttggggttctcgcacggctcttgcctcccttgctgctttgcttttgtgttcttgggttcgtcggtgttccgcgtcgctgtgcgcgtctccagcgggctctgtccagttgcttctcgtcctgtctgtcctgcgtctcttcgtctcgcttcgccagtcgctctctcatcttcgtcctctcctcgtgctgccgcgtcccgttcgtcgtgggtctggtctccttcgcgtgtcgtctgtgtcctctgttcgggctcgtgtcgcttctggtcgctgtcgtctcctgcgcggttcgccgctcttgggtctgnnnnnnnnnnnnnnnnnnnnnnnnnnnnnnnnnnnnnnnnnnnnnnnnnnnnnnnnnnnnnnnnnnnnnnnnnnnnnnnnnnnnnnnnnnnnnnnnnnnncttattggcagcaccgacgcgnaccttccaccccgtggtgaaaattttgccagttatctcgatggtatgctttgtagccctctactccaaaattctagtacgaggtccaatccagatcacacattacattagttgttatgattctattaaaacagccttttaaatatgtttaaaagaaatttaggccaggcacagtgctcatgcctgttatcccagcactttgggaggccgagacaggtggatcacttgaggtcaggagttcgagaccagcctgaccaatatggtgaaaccctgtctctactaaaaatacacaattagctgggcgtggtggcacatacctgtaatcccagctacttgaaaggc

SEQ ID NO: 1812 - protein, 332 aa, Homo sapiens
  MOD_RES (246)..(279): Variable amino acid
MSEGLPGSLRSFLVCACPRAVLRVQLLLVLRWCLLCRGVPMASLRSCLSLPLVDLLTSVGSAVLSTLSGALSHLGSLVLWCACLLLCRSVCFALVLRLLCTALAGFATAACPSPCLSLGCPCAPALLPVGPVRCTRFVPSLLPVLGFSHGSCLPCCFAFVFLGSSVFRVAVRVSSGLCPVASRPVCPASLRLASPVALSSSSSPRAAASRSSWVWSPSRVVCVLCSGSCRFWSLSSPARFAALGSXXXXXXXXXXXXXXXXXXXXXXXXXXXXXXXXXXLLAAPTRTFHPVVKILPVISMVCFVALYSKILVRGPIQITHYISCYDSIKTAF

SEQ ID NO: 1813 - DNA, 1177 bp, Homo sapiens
  source
  (1)..(1177)
  CDS (201)..(977)
  modified_base (341)..(440): a, t, c, g, unknown or other
tagcgtgtgcatcaaaatgaggtccccaaaagatattctttctctagatattgaggaaagctttaaggcaatctctggttcaaatttcaatcaataaaaagaatataaaatgaacactctctcatccaatcctgtctctagccaccaaattttcctccctggtgatagcctttattatctttttgtatgctaccccagagatgcttagtgcatatgcagaaagtgttagatattcattctcctccccgcttcacacaaatggcagctactatgcatactgcaacttgttttctttcccacatcctcttcagttgttttatctttgctcatcagctaggtannnnnnnnnnnnnnnnnnnnnnnnnnnnnnnnnnnnnnnnnnnnnnnnnnnnnnnnnnnnnnnnnnnnnnnnnnnnnnnnnnnnnnnnnnnnnnnnnnnngggtgtcctttcccctctttatgttttgtctgctttgttgaagatcagttgactgtaagtaattgggtttttttctgggttttctattctgatccatcggtctatgtgtctatttttatgccagtaccatgctgttttggtgactatggccttatatatagtgtgaaatcaggtagtgtgatgcctccacatttgttctttttgcttaatcttgctttggctatgtgggctcttttttggttccatataggttttagggttgttttttctagttttgtgaagaattatggtgctattttgatgggccttgccttctctctcttcattcctcttcctccgttgttctttttctccatattcattctacccatccatcagcatgggatatgtttccatttgtttgtgtcatctgtgatttctttcagcagtgtttgtagttttctttgtagaggtctttcacctcctggtttaggtatcccaagtatgttatttcatttttatgcagctactgtaaaagcagttgagctgttgccatgattcccctctcggccacagctcatgagtagcccgtcccttgatgtgtgtccttcgtctttttttcgccctcacaaattcaacacggcctatctttgtgtggggtgattctttgctaatttcagtgtcccattctcttacaaatcagttcagagatagaatattatagtgcgctgtggggcttaatttgcctaaatttcttt

SEQ ID NO: 1814 - protein, 258 aa, Homo sapiens
  MOD_RES (47)..(80): Variable amino acid
MLSAYAESVRYSFSSPLHTNGSYYAYCNLFSFPHPLQLFYLCSSARXXXXXXXXXXXXXXXXXXXXXXXXXXXXXXXXXXGCPFPSLCFVCFVEDQLTVSNWVFFWVFYSDPSVYVSIFMPVPCCFGDYGLIYSVKSGSVMPPHLFFLLNLALAMWALFWFHIGFRVVFSSFVKNYGAILMGLAFSLFIPLPPLFFFSIFILPIHQHGICFHLFVSSVISFSSVCSFLCRGLSPPGLGIPSMLFHFYAATVKAVELLP

SEQ ID NO: 1815 - DNA, 1015 bp, Homo sapiens
  source
  (1)..(1015)
  CDS (201)..(815)
ttatctgttacattttttctacaccacgtctgctgctcttcataaaatctaatgttaattccatttggctctatctctccttttcatgaaaaatttgcgtcttgactctttcactttgtggccaattgtgttctttcttccctctttcttgagtgtgttctgtctgttgccaatgccccaccattttagtctgataaactatggttttaaagacaaaatgctgcaacgtagtactaaatccatatctactttcaatttctttctttctgcttttccttcctgaccttcagctactgcaaaagagttgctcatcctctgtactcccacagcctttggtgtgtgtcctagcctcagtgttactagagatatatgtgttccaggtttttctgactgtgtcaagtgttttacataaagttagagtgggagcatttgggagactggcaagtcttggctgcctccccctattattttatggtgcaaggagaaaggaaacttccttgataaccatggcaggtttccatttgactgcctccactttccttattcgggctttgccactcaatgcccagcatgcttcccttgtcgtcagactgtatgtctgtgcattctctcatgggcttattcgctgtggagtgctactgcatctcagaaactccagctacgccctccaaaggcagagctcttcacatctttttgttgctattgttgttgtttgttttcgcatacctctcgagcctagcactagttcttccattctcatcatatttttattcacaggatttttgtcctacctaatcactctacatatgctctgaaaacatgccagacaattatgattttctatgtcttcactctcatttcttcaggaataccatcttgcattggtggcgtaaatagttggtgatggatacacatgggcagtcttctactgcacacaacttctagctcatcggaacatgttcctgtctatccatgcatagaacatgttctaagccttctgcttccagaacacgtt

SEQ ID NO: 1816 - protein, 204 aa, Homo sapiens [sequence omitted]

SEQ ID NO: 1817 - DNA, 14756 bp, Homo sapiens
  source
  (1)..(14756)
  CDS (201)..(276)
  CDS (979)..(1285)
  CDS (7613)..(7791)
  CDS (13694)..(14556)
  modified_base (6478)..(6577): a, t, c, g, unknown or other
  modified_base (13882)..(13882): a, t, c, g, unknown or other
  modified_base (14082)..(14082): a, t, c, g, unknown or other
  modified_base (14100)..(14100): a, t, c, g, unknown or other
  modified_base (14561)..(14660): a, t, c, g, unknown or other
ttttgatttacaggtttattgggacgtgaccccatcgtaagtcaaggagcatctgtgtttattttctccttgtgtactgagcctttatgatatgccaggccctaggctgagactttttaaaagattcttcaaagaaactattttttagagcagtttgatgatcatggcaaaattgagtggaaagtacagagagttcccatatgcctcagactccacatgatacagcgttgccccctattagcaccccataccagcgtggcatgtttgttataatcggtgatcctacactgacactgacatgtcattgacatccaatgtctatagttcacattgaggtttaggctgagactctccgtgcaccctttcattcacactcagtccttactgctgtgcccattttacagatgaggaaacagaggcccaggagagttgcatgccttgcgtgaggtcacacagctaactgcctgcctccctccgttcatggctccttcagtcttcccttcctggaggcaggagctggctggtcctcaccaggtgtgctgaggcccctctgaggacagagcttgggtgtccctggtataccttgtcccagagccaccttggccactggagagagccattgtgcatctcgtttcaccctcgtctctctagattccctgtctcctctggaagaaaagcaggggctctcccctcacggaaatgtggcattcagcaaagctggtcggagcctgcatggagacactgaggcccctgtcaactgtagctcctgtcctgggcccccgacagcatcaccctcgaggccggtgcttcatctcctccagctccttttaagaacgaacttgatgaaaacacagactttacctacaagcccggcaggagctcatggtccacactcactcgctttggggctgacagccactttcccaggggagcctggggcctcccctcgactctcaccagggccttcgacccctccaggagcccccactctacctctagcttccccaggggctcctcagccacctcctgtgactccagagcgctcgttctcagcctctggggcccagatagtgtccaggtggcctcctctgcctggcaccctcctgacggaagcttcagcactttccatgatggaccccagcccctcgaagacccccatcaccctcctcgggcctcgcgtgctttctcccaccacctctagactctccacagcccttgcagccaccacccaccctggcccccagcagcccccagtgggggcttctcggggggaagagtccaccatgtaaggaggtcactgtgtccgggagactctggagagaggacctctgccagtggcccagggtgtgtgcagggcagctccaaggatgaacctggtggggatgcgtgggctccctcctgcaggggccctggtgaggatggaagacccccaaggctggatgtaaccttgttcccaagaagtgtttggaatgtgctgtaagaatggaggaagtcgtttccactgtcaggatcctccctggaccgcgtggctggctcatcttttgacaagggttgggactgccaagttctcctggaggaagagtcgcgtccggctgagattcccctcactggggctttggcgccaggtgtcgtgcgtctctctcaggtttcctgattaaaggttgtctcggtttccccaagctgcactgctcattcacccgcttacctgtgggaaggtgggaaacgtgaccccaagcccacaggtggtaagtgagcatccacctttaccccaccgccggggagaaaagctggcaccaaattgtgactgggctcgggaagggtctcctgcaagcacttggcggccttttatcttgggagacttcttctttcttttttccccaagatcatgattttcttttctgttttcttttttctttttttcacttttattttaagttcaggggtacatgtgcaggtttattatatagttaaactcgtgtcacaggggtttgtcatacagattatattatttcatcacccagggattaagcttagtacccattagttatttttcctaagtctctccctctaccctccctccacccttccatagaccccagtgtgtgcttttcgtgtctatgtgtccatgtgttctcatcatttagctcccacttacaaatgagaacatgcggtatttggttttctcttcctgcgtaactttgctaaggatgatggcctccagctccattcatgttcctgcaaaggacattatctcattcttttttatggctgcatagtatgtacaccatggaataccatacagacactggggggcttccacagtgagaagggaaaagatgatggagaggacttgcttctgggaaggaacctctgagacgaaatgacagaccagcagtttcttttttgagatggagtttcgctcttgttgcccaggctagagtgcaatggcaaggtcttggctcactgcaacctctgcctcctgggttcaagcggctctcctgcctcagcctcctgagtatctgggattacaggtgcccgcaaccacacctgactaattttttgtatttttagtagagttggggtttcaccatgttggctaggctggtctcgaactcctgacctcaggtgatctgcccaccttgggctcccagagtgctgggatgacaggcctgagccaccgcgccgggccgggccagcagtttcttaagacgtgttttcagcaggaacacctgtgggcagcggggaaggagcagggagggagagttggggctgctgggccttctcgaagcctcagccagccccctctgggagctctggggttaggctggcccttcggagctgtcctgagctggagctacggggcagggctttctgcctcatattgaccagagagctgctatcaaccaccttcccagcagctgggagactgatccttcagtcctagtggggggatctgggcagtgtagcacagtgtgcatgagagacggaaagaggacagtgccgtcatgaatggggggatgcggatttgtgataagggaagtgatgtggggctggaaagcagaagctgctctgtcaccaagtcaccacttgctaccatttttttttttttgagacaggatgttgccctgtcatccaggctggagtgtagtggcatgatcacggctcattgcagcctcaacctcatgggctcaagccttcctcccaccccagcttcccgggtgggtgggattagaggcacatgccaccacgcctgtctaacttttaaaaaaattttgtagaaatagggtctcgctgtgttgcccagactggtcttgaactcctaggctcaagcgatcctcccacttcagcctccctgagtactgggattacgggcctgcagccccacacttgctaccactgaaacccatggaggctgcggagtgaaagcacccccgggcatggcccatcgctttgccgaggccgccctcttctgagcccttctctgacctgctactcactctgtgtcccagggcgaagggtctgctgaagtgtttcctggctgcaaaggcaacctggtatccagtccagacgacagtgtagtcctggcctctaacctgcggctggtggcaggaataataaatgtgggagataggagcatggaaaccaaacagtttagagaggcaaaggacttagaggccgttttgtccagtaagatacaaagggtcatggtcatgagcggggtctgcagccaatgaatctcaagttggagccttgctcagctggactagctgtgggatattaggtctctgctcccttattattattattttttgagacagagtcttgctttgtcacccagcctggagtgcagtgacatgatctcggctcactgcaacctccacctcccaggttcaagtgattctcctgcctcagcctcccgagtagctgggattacaggcacacgccaccatgcccagctagtttttgtattttttgtagagatggggtttcgccacgttggccaggctggtctcaaactgacctcaggtgatctgcctgcctcggcctcccaaagtgctggggattacaagcatgaaccaccgcgccaggcctctgctcccttatttggacaatggggataataacaggcctactttatggagttgtgacaatgacgtgtgataatgcctccataagtctcagtggtttgcacttgtggccctgtggcccctaaacttgctacagcccacccggcttggtgatgccacgtggggtctgatttcaggataaaagcgtagaattctcattgcccccatgctgcaacttttcaaacaagtccatctgtcaaaatggtagtggctaaaaattagtgccaatttcctcattgctgttcctttatgcaataagttagcatgcaatttaagtttaatactagtcccccccacctgcctctgcaaataggactcatgtcaatgatgttcattttgaatgtttaaaaaaaaggagtccgggtgtggtggctcatgcctgtaatcccagcattttggaaagctgaggtgggcggatcacgaggtcaggaattcaagaccagcatgaccaatatggtgaaaccccatctttactaaaaatacaaaaattagccaagcgtgatggtatgtgccgatagtcccagctactcaggaggctgaggcaggagaatcgcttgaacctgggaagcagaggttgcagtgaaccaagatcgcaccactgcactcagagcctgggtgacagagcgagactccatctcaaaaaaaaaaaaagattggttgggggtggggcagggggacagctgtaaacacttttcccaagtttttccgagtataaaaacatgtttaactggactgttccccacccaatattacagctgagaagcagaggctcagagaagttaggagagtgttctaaggctgcacagattatgacggcggaatgggaagacagcctcattcggtctgactcccagtccaggtgtttttccttcgcttcacatttcacctgatgaggttctcctgttggtgtttggagagactgctgatggcccacagtttagcagggcccctgtgaacactattttagtttggttccccctaaagcagacccagagatagtattcgggtgagaccaatataagaaacgaatcaaggcgattgatgagccggttgcaggtatgcgcaattggcagtttgtcgtagggaccttgtggaagactgtggagcccatgcgttgcctgaggattgtcccccaagggtgtgaagatgcaccagtagttgtccctcaactttcgtccctcagtggtcgagccttgtcgtggcgttttggctctctagcacaccctggtggccttgccatagtactgagcctgcctttgtgcttgtccccaggcaccagaagtgtcttggggcagaggtgcaggagccatgggtggagggctgggtcaggggtgtgactgggccatgtaagcacatgttgtgtgcacggtaaaccgcagtgcaccaggaggcaggagtccacgtgaagcccccagcggggcgcgcagtgcctttaatgggataagctgctctgaattctcgggagcctgtgctccaacaagcaagggagtgtttgttcttggatggagacaccttgcatttttcctgagctaggattccacttttagggttttgagaaacagaacagaatgggggtgtgtcggaagcttattctgtggcctcagtttcccttgcacctggcagcttctcaaagggcagaatgatcagacctgtttcaagagacctgattttaaaggttattagatgcatggcctgaaggcaagtcacggtaggtttctaagtaggacaaacttacagaggctcaaaatcgctgtaattcacttttttttttttttaacttaccctctttttaagatctttccgaggctgggagtggtggctcacatctgtaatctcagcactttgggaggccgaggtgggtggatcatgaggtcaggagttccagaccagcctggccaacatggtgaaatcccgtctctactaaaaatacaaaaattagctggtgtggtggcaggtgcctgtaatcccagctattcaggaggctgaggcgggagaattgcttgaacccgggaggccgaaattgcagtgagctgagatcatgccactgcactccagcctgggagacagagcaagactccgtcttaaaaaaaaaaaggtctttccatcttagcacccagtgagcacatttgcttcttccttttacagctgtatattgtgtggatgcaccataagttgttgaaccaactcctgtggatgcacttttgggtcatttcaaatcttgcttttccacatgatgctacaaaaaatcatgtccttacatcgctttgcacatctactagtgtatctttaaggtaaattttcagaagggaagttactgagccatatgctcctttctctctcagacggagttnnnnnnnnnnnnnnnnnnnnnnnnnnnnnnnnnnnnnnnnnnnnnnnnnnnnnnnnnnnnnnnnnnnnnnnnnnnnnnnnnnnnnnnnnnnnnnnnnnnnagaacatgagttgtcatacagcaacagggaaactgatgatgtaaaggcactacagggatcccccaggtcttcccacagtctctttgaacttcatctttcaacactgctatttacagagcacctactgtgtgctggggacacagctaagcacaaggaagccccagtccccttggtccggaagcccactgcctaggtgggttgatggccgggtgcccagggctcctgatgcctttttggaaggcgggatgttaagtagagacctggagggtggtagggactcatcaggtggggagctgaggttgctgtacccagcagagggtggaggattggagatggccgttctgcctggagcatggagagagtcaggcaggcggcaaggctgcaggtaggggttgcatcttgggttgtgttccctagaagcagggccagtgcaggcgacttaccaagggagtgctctcagaagaaactggcgagggaagaagggtggggcaggagaggaagcagggtgaaggtgtggtctcacactgatccctgggaagctctgggcagtggaccgtgctggggagcaaggctattgcacctcagggccagtcagttatagagactctctctgctccccagggagtgggggtggtgaccatctaggcatctctggaggacgcagctgccgtcagccactggcagtacttcggagacaggacctgggtgggcactgacagcctctgcccctgactcagtcctgaagggctccaccagctgcattgagggctttgcactcagtgaagctgccaaatggtttaggcagtagggagcctggatggaagcgggagggtgagagatggtgaaggccgtgcctattcccaggatgccctcctgggctcacacccagcccccattgaaggactcccagttccccccaccccactgttgtgctccttggagatttctttgtcagtttcactttagtagatttctttgtcagtttcacttgagtagccgggagggtgatggcaggcagcctgcggcctcctctagctctccatggtccccaggcagggtgccgccctcatcattctgtgcctgggctctcttccagaatggggaggtggagtgctccttcatgccctgccctgagctggcctgcccccgagaagagtggcggctgggccctgggcagtgttgcttcacctgccaggagcccacaccctcgacaggtgagctggtccagggctgccccgacacagggcatggatactggggagagaggctgagcttcacctgctgctgagactgctggtgtgtgtgctgtttgtgtgtgtgtgtacatgtgtctttgtgtgcgtgtgtatgagtgtgagtttttgtgtagtgtgtctgagtgtgtacctgtgtgtgtaagtttgtgtgtctctgagtttgtgagtggttatctgtgtgttggtgtgttagtggtacctgcgtatgtgtgtctttgtatttatgtatatgagtgtgtgtctgtgttttgtgtagtatgtctatgtgtctctctgtgggtgtgtgtgtatgtgtctgtgtttttgtgtgtgcctgggtgagcatgcatctttgtgtctgttgtgtctgcatatgtgtgtgtgcatgtaagtgtatgtttgtatgagtgtgtctgcgtgagagtaagtttgtgtgtctgtgtgtgagtagtgtgcgtccgtgtgagcatgtatgtgtatgtgtgcatttgtatgaatgtgtgtaaatttgtgtacatgtgtctttgcctgtgtacgagtgtgtatctgtgttttgtgtagtatgtcttagtatgtgcctgtgtgtgtgtgtttctgtgtttctgaatagttttctgtgtgtgtgtgtcagtgtgttaatggtatctgtgggagtctgtgtacatgtgtctttgtgtatgagcatgtatgtgtatttttgtgtagtatgagtgtgtctctgtggtatgtatgttatgtgtctgtttttgtgtttttgtgtgtgcctgtgtgagcatgcatgtctgtatgtgtgtatgtgcatgtaagtgtatgattctatgagtgtgtctgtgtgtaagtttgtgtctctctgagtagtatctgtgtgtgtgtgtctgagcatatgtatgtgtatgtaagtgtatttgtatgagtgcgcgtccgtgtgagttgtatctgtgtgtgtacgtaaatgtgcatttgtatgagtatgtgtgtgtctgtgtgcatgtgtgtctgtgccgtatctgtgtgtgtatgtaaatgtgcatttgtatgagtatgtgtgtgtctgtgtgcatgtgtgtctgtgttgtatctgtgtgtgtatgcaaatgtacatttgtatcagcatgtgtgtctgttgtatctgtgtgtgtatgcaaatgtacatttgtatcggtatgtgtatgtctctgtgcatgaatggtatctgtgtgtacatgtatatttaagtgtgcatttgtatgagtgtatgtgtatctgtgtgaattgtatctgtgtaagtgtgcatttgtatgagtgtgtgtaagtttgtgtgtccgtgtgtgagtgatatcggtgtctgtgtgtgtttgtgcgcatgaggcatctgtccttgctgctgttgtagtctaggtcttgtgccgtcttttctctgccattgtcctcatccaggctgctctcttgacgacaacggggttgagtttccgattggacagatctggtcgcctggtgacccctgtgagttatgcatctgccaggtgaatgacaacctgctcgccttcagctgctttacctggctgccccgcctcacccagaggagacaagcgtcctggcccctccagaggctggcctcaggctggccgcagtctccctccggtgctgtcaagttccactttcacaaaaagggttggaccgagtttatcctgctctcagtagatgtgtgaggacgatggtgcttggcagttggccttaagaagtgtgtattgttggccaggtgcggtggctcacgcctgtaatcccagcactttgggaggccgaggtgggtggatcacaaggtcaggagatcgagaccatcctggctaacatggtgaaaccctgtctctactaaaaatacaaaaaattagccgagcgtggtggtaggtgcctgccttcccagctactcgggaggctgaggcaggagaatcgtttgaacccgggaggaggaggttgcagtgagctgagatcacgccactgcaccccagcctggcgacaaagcaagaaggagtctcaaaaaaaaagaaaaaaaaagtgtgtatggccaagagtggtggctcacgcctataatcccaacatagctgaggtgggaagattgcttgagcccaggaatttgagaccagcctgggcaacatggtgagaccctgtctctacaaaaaaatacaaaaattagctgcatgtagtgacatgcccctgtggtcccagctacttgggaggctaaggtgggaggatcgcttcctcagctcctgaggctgacccaggaggtcgaggctgcagtgagccgtgatcacatcactgcattccagcctgggcagaagagaaagatcctgtttcaaaaaaaaaaaaaaaaaaaagtgtgtgtaacacagtgtgcatgtgcagggagctgctggcatgaggagtaagaattaggaatcttcatagaaggttttccccaggcatggataactgagggagtggggtagcctgagacccagttgttcaggctgtttctgtgaaattgcaatgttttcttcatgactgcaaaagatgtgacctcaccatttcagaaatgagtaaggaggtgcatgagtttgagtcagatcaacaacaatgcaaacacagctatccacccagaaatacaattgttttagctcattattgaagtactagtaattgcagttttttaccattacttacaatggcagaaaccgcaattacttttgcaccaatctaatacatgctggctttcctttctactttaagagcttcgagtcttttagaggtttatttctcaaaatgaggtcccttgcacctgcgttgggagccctggttagacgtgcagcctttcgaggccctgcccacacctctgctctcacaaactgcattttaacctccaggtgatttgtgtgcactttcatgtgggagaagcccagccttctagtgccttcgatgagccgtttgttaaaaagctgtaagctgggccgggcgcggtggctcacgcctgtaatcccaacgctttgggaggccgaggcaggtggatcatgaggtcaggagattgagaccatcctggctaacatggtgaaaccctgtctctactaaaaatacaaaaaaaattagctgggcgtggtcgcgggcacctgtaatcccagctactcgggaggctgaggcaggagaatggcgtgaacccgggaggcggagcttgcagtgagtcaagatagagccactgcactccagtctgggcaaaagagtgagactccgtctcaaaaaaaaaaaaaaaaaatgctgtaagctgaacacgtctcattgaaattagagttgggaggaaagtccttcctgtgctgtcttctcctttatgactgatttcgggcacccataatcagtcaccaagagagtgatacaaaaggttcaaactgtcagattgtttttgtgtttttttcttttaaagaaaaagaggccggttgcggtggctcacacctgtaatcccagcactttgggaggccaaggcaggtggatcatctgaggtcaggagttcaagacgagcctgaccaacatggtgaaaccccatctctactaaatatacaaaaattagcctggcgtggtggcgcatgcttgtaatcccagctactcgggaggctgaggcaggagaaccatttaagcccgggaggtggagtttgcagtgagccaagattgcgccattgcactccagcctggcaatagagtgagactccgtcttaaaaagaaaaaaaaaaaaagaaagaaaccttgtatggcactttggctctctgaaatagacacttctggtggcattgttttttctaaaaatagggttttatggtactctgtaggttcctggtgagccagggttccagggaaaagctgagaaaggatttggatggtggtgaaggtgtaggctttggctgctacaggaagcggaggagaccagaatcccaaccctgaccttccttctccttaaagatgcatagacttcctggaaggctcacatggcctttctcaagtagccgatcctctttaggggagacctgccatcttccagccgcgtcatgttgccttcagggcaagccttggccagtttgcagcgttgctgtttcttttgcagggcggggaggcaggggccggtgtcaccggtggggtcttggtgaagttcctccttcctccaggcagatggctcggtgagctgcaagaggacagactgtgtggactcctgccctcacccgatccggatccctggacagtgctgcccagactgttcagcaggtaatcccctgcctctgccccaagcccccagggcagggcatctcaggcatcgggctccttaagccctatacagccttcatctcatgtcgtcctaacaaccccaagggacaaccccattgcacagataaggaaactgaggtagaacagtttacccaagtcaggccccctctgagtgctcgaggcagatctgaagacacgcagggcttacggtgcaggtgggtggtacaggagctgcacctgtgagacaattggaggacagcaggaggagagaaattttaacagtcatttttgcgttttaatagtcatttttaccttttccatgatttcagaagtaatgttttattatagaaaatttatcttatttttttgagacagagccttgctctcttacccacgccggagtgcactggcgtgatctcagctcactgcaacctccacctcccgggttcaagtgattctcctgcctcagccttctgagtagctgggatcacaggtgcccaccaccatgcctggctaatttttgtatttttagtacagatggggtttcaccatgttggccaggctggtctcgatctcctaacctcaggtgatctgcctgccttggcctcccaaagtgctgggattacaggcatgagccaatgcacccagctccattatagaaaatttacaaaaaaagtacagaaagcaaaaataaagaatattagcaaggttctattagcactgttaaatttgtgtttatgtccttctagtctctttttgtgatgctcacacacatttagtagatgtacattatatatataatatatatataaacatacatatattcatttatcttagtttatttttttaaagcttcccctactgtctcatcacctgcttttacacttagcagtatatgatagtgtcatccaaggtggcatcactcacatcaggcttctggggctgtcaggaatcagagaggggagtagtgttggggaatgttctggacaggcggggttggtggtttgagtgagtttggagggcagagaggaggttgggaagatgctgtggggcctcacacacacctcgtatttcccagttcttccacctgatcccccctggtgaggaggtagaggatgaatctccccactcttcagggtgaggacactgaggccaagacacttgatccttttgctgaatccagtgggaaaaaagtcaatacccgattcagacaatccaaacaggcgttttgtcccttccctaactcccagggtgactgcctggggaggcacatggcctcccctttgccatccagataagcctgtgaccttggccctggcgggaagcctggtgcctggccactcccagctggtgctcagcgcatgctctctctggcaggctgcacctacacaggcagaatcttctataacaacgagaccttcccgtctgtgctggacccatgtctgagctgcatctgcctggtatggaccacccagatctgactcccgcccctggaaactcccccacaactgacatcggctcctgaatcccagaggcaaaatccagagacctccaagacaagggatgcttctggttcatggtggaagtcagatccctccagtcctgcccagggtgaccctttagacagggccgggggggttggtctgtgtgtggtgtttgtgggtggggggcccgtgttctggtggccgccggggtgcccgggggttgtgtcgttgcctggtgggtcgtgcgtccgttggggctgccgcctggcggtgggggttgcggggtgtttccccggggggctttgctgtgggcgttgtgtttcgtgcgcgtnggttgcgtggtgcggcgtgtgcgcggcgtgttggttgctccgctgggggcgtggcggtgcgtcgtgcggctgtggtgccgcggccgcgttggcgtgccgttgtgcgtggttgtgtgtgctcgggcgttggtgcgctcggtgcgtgcgtcgggggggtggtgtcggcgggctggttggggcccgggtgtgcgtgtgtgtgntgcgcgcgtgggcggccncgggtggtgtgtgtcgcgtgcgtgccggctggctggtgcggcgggtggggggtggcgtgtgcgttgggggcgggtgtggcgcgggcgtgcggtgcgcgctgtgtcgacctgctggcggcgtgtcgtgtgcgcgcggtggccgtggcgtgcgcctgtgctggcgtggtgtgtggggctgctgctggccggcgggtgggcgggtgggtcgcgcgggcgcgcgtgtgggcggtgttggcgggcggtgtgtgtgtgcgtggggtggtggtgctgggtcgtgtggctggtgcgctgtcgttcgcttggtgtcgcgtggcgggcgcgtgtgtgtgtgtggtccgcgcgtgtgtggctggggtgctggtgcgtcgtgctgggctgtggtgtgtgggtgggtgcgtgtcgtggtgtgtggctgcgtggctgtgggtgcgtggtgttgtggcggtgccgggctgttcgcnnnnnnnnnnnnnnnnnnnnnnnnnnnnnnnnnnnnnnnnnnnnnnnnnnnnnnnnnnnnnnnnnnnnnnnnnnnnnnnnnnnnnnnnnnnnnnnnnnnngtttacttgttcttatcttgtgctcattcgtctcttttctcttctcacttatcttctcttctttcctatttcttcctttcttcacttcttttctta

SEQ ID NO: 1818 - protein, 475 aa, Homo sapiens
  MOD_RES (251)..(251): Variable amino acid
  MOD_RES (317)..(317): Variable amino acid
MPQTPHDTALPPISTPYQRGMFVIIGAPTLPLASPGAPQPPPVTPERSFSASGAQIVSRWPPLPGTLLTEASALSMMDPSPSKTPITLLGPRVLSPTTSRLSTALAATTHPGPQQPPVGASRGEESTISPWSPGRVPPSSFCAWALFQNGEVECSFMPCPELACPREEWRLGPGQCCFTCQEPTPSTGPGGLVCVWCLWVGGPCSGGRRGARGLCRCLVGRASVGAAAWRWGLRGVSPGGFAVGVVFRARXLRGAACARRVGCSAGGVAVRRAAVVPRPRWRAVVRGCVCSGVGALGACVGGVVSAGWLGPGCACVXCARGRPRVVCVACVPAGWCGGWGVACALGAGVARACGARCVDLLAACRVRAVAVACACAGVVCGAAAGRRVGGWVARARVWAVLAGGVCVRGVVVLGRVAGALSFAWCRVAGACVCVVRACVAGVLVRRAGLWCVGGCVSWCVAAWLWVRGVVAVPGC

SEQ ID NO: 1819 - DNA, 1465 bp, Homo sapiens
  source
  (1)..(1465)
  CDS (201)..(1265)
cagagatatatattcctatatatatatattccagagatatatattcctatatatatattccagagatatatattcctatatatatattccagagatatatattcctatatatattcctctctatatatattcctatatatattcctacatatctatattccggatatgtatatacattcctacatatctatattccggatatgtatatacattcctacatatctatattccggatatgtatatacattcctacatatctatattccggatatgtatatacattcctacatatctatattccggatatgtatatacattcctacatatctatattccggatatgtatatacattcctacatatctatattccggatatgtatatacattcctacatatctatattccggatatgtatatacattcctacatatctatattccggatatgtatatacattcctacatatctatattccggatatgtatatacattcctacatatctatattccggatatgtatatacattcctacagatctatattccggatatgtatatacattcctacagatctatattccggatatgtatatacattcctacagatctatattccggatatgtatatacattcctacagatctatattccggatatgtatatacattcctacatatctatattccggatatgtatatacattcctacagatctatattccggatatgtatatacattcctacagatctatattccggatatgtatatacattcctacatatctatattccggatatgtatatacattcctacatatctatattccggatatgtatatacattcctacatatctatattccggatatgtatatatattcctacatatctatattccggatatgtatatatattcctatatctatattccggatatatatatattcctatatatgtattcttatatatatattccacatatatattcttatatatatatattccacatatatatattcttatatatatattccacatatatatattttcttatatatatatattccacatatatattcttatatatatattcttatatatatatattccacatatatatattcttatatatatatattccacatatatatattcttatatatatatattccacatatatatatattcttatatatatatattccacacatatatatattcctatatatatattccagataaaagatggtggtcacccaggccatgatgccaacagtgatggtggtaaaaagtggccaagctctggatgtatttttacaaacagagcagagaggatctgctgatggaatggatgtcagctatgaagggaaaagaggaggtcaactgtgaagggaaaagaggaggcagggatgacttcagaattctcggccagagctgctggggaaatggagattccatcaactgaga

SEQ ID NO: 1820 - protein, 354 aa, Homo sapiens
MYIHSYISIFRICIYIPTYLYSGYVYTFLHIYIPDMYIHSYISIFRICIYIPTYLYSGYVYTFLHIYIPDMYIHSYISIFRICIYIPTYLYSGYVYTFLHIYIPDMYIHSYRSIFRICIYIPTDLYSGYVYTFLQIYIPDMYIHSYRSIFRICIYIPTYLYSGYVYTFLQIYIPDMYIHSYRSIFRICIYIPTYLYSGYVYTFLHIYIPDMYIHSYISIFRICIYIPTYLYSGYVYIFLYLYSGYIYIPIYVFLYIYSTYIFLYIYIPHIYILIYIFHIYIFSYIYIFHIYILIYIFLYIYIPHIYILIYIYSTYIYSYIYIFHIYIYSYIYIFHTYIYSYIYIPDKRWWSPRP

SEQ ID NO: 1821 - DNA, 1585 bp, Homo sapiens
  source
  (1)..(1585)
  CDS (201)..(1385)
  modified_base (3)..(12): a, t, c, g, unknown or other
  modified_base (14)..(14): a, t, c, g, unknown or other
  modified_base (17)..(17): a, t, c, g, unknown or other
  modified_base (20)..(20): a, t, c, g, unknown or other
  modified_base (820)..(919): a, t, c, g, unknown or other
  modified_base (1090)..(1090): a, t, c, g, unknown or other
cannnnnnnnnnanggntgnagatgttgactagagaggaacagacacagacacacacaaacacacacatttgctgggatgacagaaatggtcttattttgttctgggtgagaacttgatggcattgaggcatgaaaacttaccagagtggccaggtgcggtggttgacgcctggtgtgccgtcgcgggttggaagattacatgaggtcgggagtggtaaaccagtctggtcgtgatggggaaactttgtgtgtgtgggggtttcgggttttggccatgtgtggcgcggcgcgtctggtggtcgctggtccttttcgggcgctcggcggtttattgggtttccgcgcgggggcgggtggggcgtggtgggttttggttttccgtgcctttttcgcccgtttcggctcgccttttttttttccttttcctttgtgtcgggtgccccttcccgtttttgggtgtggtggtgtgtgtttcggggttgtttccgtctttttgtttttttttgtcccgcgccgcgcgggtccgattgttttgccggcttttgcgcggttggctttggccctttcgcgggttcggtttgtcgcgggcgtgttgtgttcgttttccgcttgggtgcggtcggttccttcgggtctgttcgcttttccgtttctcgcgttcttccgtggtttttcggtctggcccgggtgctacggtttgcagcgctgttgtttgcgtgccgttctggctgtggttctttgtgatgtcgtgcgcggcgtgttacgcttgtgggtagtcgttgtcgcgcgcgcttatacaaaaactaaaaaaatagaatnnnnnnnnnnnnnnnnnnnnnnnnnnnnnnnnnnnnnnnnnnnnnnnnnnnnnnnnnnnnnnnnnnnnnnnnnnnnnnnnnnnnnnnnnnnnnnnnnnnntcatcaacttctgcactcaagcctgggtgaaagagtgatactctgtctcaaaaaaaattttttttttttaattagccagatgtgggggcacgtacctatagtcccagctactcaggaggctgaggggggaggattgcttgaaaccaggagtttgaggctgcagggagctgnaattgtgccactgcactgcagcctgggtgacagagggagatcctatttctttttttttggggggggggggacggagtctcgctttgtctcccaggctggagtgcaggggcattgtctctgctcattgcaacctccacctcctgggttcaagcaattcttttgcctcagcctccaaaatattagagggattagggttgggattacagttgcctgccaccatgcccggctaatttttgtatttttagtagagatggggtttcaccatgttggctatatgctggtcttgaattcctgacctcaggtgatctgcctacctcggcctttcaaagtgctgggattatagacatgagccaccatgcccagcttgatcctatttcaaataaataaataaaatagacacagtattggccaagatttgagtaaattaataagcgctgatcagagtgcagagaattgggctgtttctatacaaaaccaatagaaatgcaaattgat

SEQ ID NO: 1822 - protein, 394 aa, Homo sapiens
  MOD_RES (207)..(240): Variable amino acid
  MOD_RES (297)..(297): Variable amino acid
MRSGVVNQSGRDGETLCVWGFRVLAMCGAARLVVAGPFRALGGLLGFRAGAGGAWWVLVFRAFFARFGSPFFFPFPLCRVPLPVFGCGGVCFGVVSVFLFFFVPRRAGPIVLPAFARLALALSRVRFVAGVLCSFSAWVRSVPSGLFAFPFLAFFRGFSVWPGCYGLQRCCLRAVLAVVLCDVVRGVLRLWVVVVARAYTKTKKIEXXXXXXXXXXXXXXXXXXXXXXXXXXXXXXXXXXHQLLHSSLGERVILCLKKNFFFLISQMWGHVPIVPATQEAEGGGLLETRSLRLQGAXIVPLHCSLGDRGRSYFFFFGGGGTESRFVSQAGVQGHCLCSLQPPPPGFKQFFCLSLQNIRGIRVGITVACHHARLIFVFLVEMGFHHVGYMLVLNS

SEQ ID NO: 1823 - DNA, 1354 bp, Homo sapiens
  source
  (1)..(1354)
  CDS (201)..(1154)
gtttctctgttcaaagagaaaggggcctcggcatctcaagcccccgagctccatgaccatctctcacacactgtcttcacctcctgtgttctcaggcagctccatcgactcagtgaccagctcctccgctgccagggctctgaggtcttggctgctcaccccctgggtttgccccactgtttctgatcggcctcctttgcatgtctgcacagccctgcccttcctccttcctggatggcccctccttgtggctcttcctgctgtttcccatcacccggccctgctgctgtgaggagttcaggccacctgggattgcagtgctggcctggcagaggcttcccttcctctgtggccctggctgtgccagcctcctgtctgctgccccacagcctgtggcctgtccactctacacacggtgccttttgtccctgcgcccatcccaattcctgtccttctcactcttccttcaaaacagcattttccaaacattttggagtgcagcttatggtcagaaaagcatttttatcacaactgtgcgtgtgtgtgtgtgtatgtgtatgtgtatatgtgcatgtgtgtatgtgtgtgtttgtgtatatgtacatgtatgtgcgtatgtgttttgtgtttgtgcatgtgtgtttgcatgtctgtgtctgtgtgtatgcatgtgtgtatgtgtgtgcgcattatgtgtgtatatgtgggtatgtgtatgtgtgtgcatgtatgcatgtatatatgtgtatgtgtgtatttgtacgtgtgtatgtgtgtctctgtgtgtgtgtatgtacctgtgtgtgagtttatgtgggtatgtgtgtacatatgtgtgtatatgtgtatatgtgtatgtgtttatgagcatgtatgggtgtgtatgtatgtgtgtgtgcatgtgcatgtatgtatgtgttaatgtgtttatgtgtatgtgtgtgtgcatgtgtatatgtgcgtatgtgcgtgtgtatatatgtgcatgtgtgcgtgcatgtattgtgtgtatatgtgtatgtgtgtgtatgtgtgtgcatttgtatatatgtgtatgtgtgtgtctgtgtgtgtttatgtgtgtgtgcgtgtgtgtgtgtgtgtatgtgtgtgtatgtataactgaaacaaaagtttcacaaaatagcatgtagtctgcgccatgcaatctgtttattttccattctgttctattaatacttcatttttataaaacgtgttggttgcaacccacgaaattcatgccctgacccctgtgtgtcactagcggcagcccagagccactgcagcccacagcccagtcagcgcctcccccgaagcctgcccacatccacagacgtggtttggcttctgc

SEQ ID NO: 1824 - protein, 317 aa, Homo sapiens
MSAQPCPSSFLDGPSLWLFLLFPITRPCCCEEFRPPGIAVLAWQRLPFLCGPGCASLLSAAPQPVACPLYTRCLLSLRPSQFLSFSLFLQNSIFQTFWSAAYGQKSIFITTVRVCVCMCMCICACVYVCVCVYVHVCAYVFCVCACVFACLCLCVCMCVCVCALCVYMWVCVCVCMYACIYVYVCICTCVCVSLCVCMYLCVSLCGYVCTYVCICVYVYVFMSMYGCVCMCVCMCMYVCVNVFMCMCVCMCICAYVRVYICACVRACIVCICVCVCMCVHLYICVCVCLCVFMCVCVCVCVYVCVCITETKVSQNSM

SEQ ID NO: 1825 - DNA, 1168 bp, Homo sapiens
  source
  (1)..(1168)
  CDS (201)..(968)
gagacatcatgagaaattgcaaggcctatttttgcaaggagatgctttaagaacatcaagcttaggctgccagctggaatattataatcataataccaatcaaagagaggtagggggacagtgggatgggatggagtgggatagggctcattaatgactgaaatattagggagggataaggatgtgtccaacacaatgtgatgatgatgatggtgatgatgatgatggtgatgatgatgatggtggtgaggatgatggtgatgatgatgatggtggtgaggatgatggtgatgatgatgatgctggtgatgatgatggtgataatgatggtgatggtgatgatggtgatgatggtggtgatgatgatggtgatgatgatggtgatggtgaggatggtggtgatgatggtggtgatgatgatggtgatggtgatgatgacagtgatgatggtggtgaggatgatggtggtgatgatggtggtgaggatgatggtgacgatggtggtgatgatgatggtgatgatgatggtgatgatgatgatggtgaggatgatggtgatgatgatggtggtgatgatggtggtggtgaggatgatggtgatgataatggtggtgaggatgatggtgatgatgatgatgctggtgatgatgatggtgataatgatggtgatggtgatgatgatgatgatggtgatggtgatgatggtgatgaggatgatggtgatgatgatgatggtgttggtgatggtttttgcatcttccattcatgaactaagtactcttattagtgattttcttttgtttgccatcttatcctatgatttcactcttgtattcttttactcttcaagtataggaaacttggcttgccaaatatattatgagctccttaaagacaaggctttgggatatatgttctatgtagtgtgtggtgatgaaagcttgggctttgcagtcagaccgacctgactcagcaacacactgacctctgtgaccctgaataggtgagtttatgtctctgagcttctgctttcccatctgcagagaggggataatgatacacctacacaacagggaggctgagaggactgagtgagataatgctacagagtgatgaggagtggccattatcactgtgaacactgtagaagcctaataaatatttgaca

SEQ ID NO: 1826 - protein, 255 aa, Homo sapiens
MMMMVMMMMVMMMMVVRMMVMMMMVVRMMVMMMMLVMMMVIMMVMVMMVMMVVMMMVMMMVMVRMVVMMVVMMMVMVMMTVMMVVRMMVVMMVVRMMVTMVVMMMVMMMVMMMMVRMMVMMMVVMMVVVRMMVMIMVVRMMVMMMMLVMMMVIMMVMVMMMMMVMVMMVMRMMVMMMMVLVMVFASSIHELSTLISDFLLFAILSYDFTLVFFYSSSIGNLACQIYYELLKDKALGYMFYVVCGDESLGFAVRPT

SEQ ID NO: 1827 - DNA, 1192 bp, Homo sapiens
  source
  (1)..(1192)
  CDS (201)..(992)
tgcagatggagtgagcatttcccaaaaaataaactggctgacatcattagaggaaactgcaagtttttttatttttgttttttcactggtttgcagctttgattttctgcccctggattttgtaggtgatcatctgggagctccatgtatgtgtgtgtgtgtgtgtatctgtgtgtatatatatatacacacacatatatatgcatatatatacacatacacacacgtgtgtatatatgtatatacacacatacacacacgtgtgtatatatgtatatacacacatacacacacgtgtgtatatatgtgtatacacacatacacacacgtgtgtgtatatatgtgtatacacacatacacacacgtgtgtgtatatatgtgtatatgtgtatatatacacacgtgtgtatatatgtgtatatgtgtatatatacacacacgtgtgtatatatgtgtatatatgtatatatacacacatgtgtgtgtatatgtatatatacacgtacatgtatgtgtgtatatatgtatatatacacacgtgtgtatatgtatatatgtatatatacacacgtgtgtatatgtatatatgtatatatacacacatgtgtgtatatgtatatatgtatatatacacacatgtgtgtatatgtacatatacacacacatatctgtgtgtatatgtatatatacacacacatatctgtgtatatatgtatatacacgcacacacatatctgtgtatatatgtatatacacgcacacacatgtgtatatatgtatatacacgcacacacatgtgtatatatgtatatacacgcacatacatgtgtatatatgtatatatacgcacatacatgtgtatatgtgtatatatacatgtatgtgtatatacgcacatacatgtgtatatgtgtatatatacgtgcatgtatatatacatatatacatgtatgtgtgtatatacatataaacatatatatgtatatatataatattttttaagaattatactgaggtcgggtgcattggctcacgcctgtaatcccagcacgttgggaggccagggcaggtggatcacttgaggtcaggagttcgagaccagcctggtcaacatggtgaaaccccatctatactaaaaaaaaaaaattagctgggcgtggtgttgcacacctgcaatcccaactactcagga

SEQ ID NO: 1828 - protein, 263 aa, Homo sapiens
MHIYTHTHTCVYMYIHTYTHVCIYVYTHIHTRVYICVYTHTHTCVYICVYTHTHTCVYICVYVYIYTRVYICVYVYIYTHVCIYVYICIYTHMCVYMYIYTYMYVCIYVYIHTCVYVYMYIYTRVYMYICIYTHMCVYVYMYIYTHVCICTYTHTYLCVYVYIHTHICVYMYIHAHTYLCIYVYTRTHMCIYVYTRTHMCIYVYTRTYMCIYVYIRTYMCICVYIHVCVYTHIHVYMCIYTCMYIYIYTCMCVYTYKHIYVYI

SEQ ID NO: 1829 - DNA, 1180 bp, Homo sapiens
  source
  (1)..(1180)
  CDS (201)..(980)
  modified_base (284)..(285): a, t, c, g, unknown or other
  modified_base (288)..(290): a, t, c, g, unknown or other
  modified_base (292)..(294): a, t, c, g, unknown or other
  modified_base (314)..(314): a, t, c, g, unknown or other
  modified_base (316)..(316): a, t, c, g, unknown or other
  modified_base (318)..(318): a, t, c, g, unknown or other
  modified_base (321)..(321): a, t, c, g, unknown or other
  modified_base (326)..(326): a, t, c, g, unknown or other
  modified_base (328)..(333): a, t, c, g, unknown or other
  modified_base (336)..(338): a, t, c, g, unknown or other
  modified_base (342)..(343): a, t, c, g, unknown or other
  modified_base (345)..(345): a, t, c, g, unknown or other
  modified_base (347)..(347): a, t, c, g, unknown or other
  modified_base (350)..(350): a, t, c, g, unknown or other
  modified_base (496)..(496): a, t, c, g, unknown or other
  modified_base (766)..(865): a, t, c, g, unknown or other
gagcctggctgcaggtctgtgttttaactactaggcatgctgcttgttcatgccagaaactactactactattattgctactaataatttatatacaaatatatatattatatacaaatatatatatatttttatacaaatgtatatgggatagaagtgtatatgtatattctggtacgtatttatatacgcatgtatatatgtatatacatgtgtcatggcagacacacatgtatatctgcatacaaatatatatattagtctcaagtatatatcttggtctnnatnnntnnnatgcacggttatacaggttntntnggnatgcntnnnnnnggnnncganntntngtntttttgtttttagccttttttgtgctttctgactatttgtccatttttgcgtttttatttttttcctcttgtgctttgttgtctttttttttgctggttcctattgtttctttgctctctgttttcgctttttttaggagtctttnttttttttttcctctttctttttcctgtcttctttttatattgctgtttgttgtgtttttggtccggcttattttgtttttgttttctttctttatttttgcttctctttttttttttttggtttatttttctttttttccggtttttttgatttatgctctgggtttttacttttttctggtcgtcgggttgttttttacgcgcggagtctttcttgtcttttcttttttctgttttctcacgcacttttttgtgtttttttttttttnnnnnnnnnnnnnnnnnnnnnnnnnnnnnnnnnnnnnnnnnnnnnnnnnnnnnnnnnnnnnnnnnnnnnnnnnnnnnnnnnnnnnnnnnnnnnnnnnnnnctggtggccatcttgctaccatgaggcccacctaaaaataaagctaatatgcaggaaagcaaagtccagagaaggagagacagagaggagagctcctggatccccctgtgcctgaaagccacttatcccaagaattttccattcttagagcctgtagcttaaacctatatgaattgggtttctggcacttgctaccatcatgagtcctgaactatgggagaaggctaggatgggatgtacacagtagtcatctcatcaatgaccttgatgaggctgggcctttaagaggagaccaaccctggatgtgtactgccg

SEQ ID NO: 1830 - protein, 259 aa, Homo sapiens
  MOD_RES (29)..(32): Variable amino acid
  MOD_RES (38)..(41): Variable amino acid
  MOD_RES (43)..(46): Variable amino acid
  MOD_RES (48)..(49): Variable amino acid
  MOD_RES (99)..(99): Variable amino acid
  MOD_RES (189)..(222): Variable amino acid
MYIHVSWQTHMYICIQIYILVSSIYLGLXXXXARLYRXXXXAXXXXRXXVFLFLAFFVLSDYLSIFAFLFFSSCALLSFFLLVPIVSLLSVFAFFRSLXFFFPLSFSCLLFILLFVVFLVRLILFLFSFFIFASLFFFLVYFSFFPVFLIYALGFYFFLVVGLFFTRGVFLVFSFFCFLTHFFVFFFFXXXXXXXXXXXXXXXXXXXXXXXXXXXXXXXXXXWWPSCYHEAHLKIKLICRKAKSREGETERRAPGSPCA

SEQ ID NO: 1831 - DNA, 1600 bp, Homo sapiens
  source
  (1)..(1600)
  CDS (201)..(1400)
aaaggtccttatccccctggtctcttgtttctagacttcgcacatatttaagtttgttacctctactgtctttcctcttttcaaacagtatctatgcctgccaaatgtgaacatacaaaaaacaaatcagaatatgccattctgatttaaactgcttattagttaataccctcaagataacatctgggttcttagctgcaatgagtcaagcttacatctttttttgtctttggctgcacatttcctatcacatcacactccagcaataccaagctgtgccgtccttctaccccatctccactattttgcccccatccgccgcggctttttcccccccaccccgcctcagctttttgcccgccacggctttttgccccctgcctccgcggctttttgccccctgcctccgcggctttttgcctccgcggctttttgcccgacccggctttttgaccccccgccgccgctgctttttgcatccccgccgccgctgctttttgcatccccgccgccgtggctttttgcccgccgcggctctttccgcccaccgccgcggctttttgtcgccgcggctttttgccaaccgaggctttttatcctacgccgccgcggctttttccccgacccggctttttgctcccccgccgccgcgactttttcacccccgccgccgtggctttttgccgccccggtgccgcggttatttgcccgtcgcggctttttgcacccccgtcgccgcggctttttgccccctgctgccggctttttgctcgaaccggctttttgcccccccccccccccaccgccacggctttttcacccccgccgccgcggctttttgccctcccggtgccgcggttatttgcccccccccggtgccgcggttatttgcccgtcgcggctttttgcatccccgtcgccgcggctttttgcccccctgccgccgcggctttttgcctccgcagctttttgcatcccccccccccccgtggttttttgtttccgcggctttttccccccccccccccggcttgttgccggcttcggctttttgcccccccccccccgccactgtggctttttggcccccccccccgccactgtggctttttgccccccccccccgccactgtggctttttgcccccccactcccccccgccactgtggctttttgcgtctttgtgcccccgccgccctggctttttgcccgcgccaccactgctttttgcacctttttgcccccgccgccgcggctatttgccccccgccgccgcgacgttatatggttttttgctcccactgctttttgcctccgccgccgcggctttttgcccccccaccaccgcagctttttgcgcgtctcggctttttgccccatggccatcgtcagaagtgtgagtggaacagagggaagggaaagctgttttcttcgaaagctcaaaaatcttcaacttttaaatagggataagtgttatttttgctccaagcacacatttgagaaatcttccatttagcggatctgatgataaacccacatttttgtttgttttaatctgaaaatgtatttgtatggttcttggaaatatttttttcatata

SEQ ID NO: 1832 - protein, 399 aa, Homo sapiens
MSQAYIFFCLWLHISYHITLQQYQAVPSFYPISTILPPSAAAFSPPPRLSFLPATAFCPLPPRLFAPCLRGFLPPRLFARPGFLTPRRRCFLHPRRRCFLHPRRRGFLPAAALSAHRRGFLSPRLFANRGFLSYAAAAFSPTRLFAPPPPRLFHPRRRGFLPPRCRGYLPVAAFCTPVAAAFCPLLPAFCSNRLFAPPPPHRHGFFTPAAAAFCPPGAAVICPPPVPRLFARRGFLHPRRRGFLPPCRRGFLPPQLFASPPPPWFFVSAAFSPPPPGLLPASAFCPPPPATVAFWPPPPPLWLFAPPPRHCGFLPPHSPPPLWLFASLCPRRPGFLPAPPLLFAPFCPRRRGYLPPAAATLYGFLLPLLFASAAAAFCPPTTAAFCASRLFAPWPSSEV

SEQ ID NO: 1833 - DNA, 1372 bp, Homo sapiens
  source
  (1)..(1372)
  CDS (201)..(1172)
cctatctcaaaataaataaataaaggacacattcttatcagctgtagtcaccacgttcattacaccttagaacccgctaatctcataactgcacctttgttccctgtgaccctcaactcccggtcccctccagccctgacagccactgttcactctgcttctgtgagttccgctttttcacacgtcactcgagtgaggccatgtgctgtttgtctttctgtgcctggcttatctcacttaccacaaatgcccttcaggttcatcgtgtcctcacaaatggcgggcttgccctgccctgccctgccctgccctcccttcccttcccttctctctctctcctttctctctctctgtctctctctctctcccccccttcccttttcctcctgtggaataacactcctgtatgtgtgtgtacgcatgtgtgtgtatacgcgtgtgtgtacgcatgtgtgtgtatacgtgtgtgtacgcatgtgtgtgtatacgtgtgtgtgtacgcatgtgtgtgtatttcttcccttccctcccctccccttccctcccctccccttccctcccctccccttccctcccctccccttccctcccctccccttctttcccctccccttccctttccctccctgtggaataacactcgtgtgtgtgtgtgtgtgtgtgtgtgtgtgtgtgtatgcatgtgtgtgtatttctccccttcccttcctttccctcccctcctccctcccctcccttcccctccccttccttttcccttctgtggaataacgcttgtgtgtgtgtgtgtgtatatatgcatgtgtgtatatttctccctttcccttcctttccctcccctcctcccttccctcccctcctcggtcccttcccctccccttccctttccctccctgtgggataacactcgtgtgtgtgtgtgtgtgtgtgtgtatgcatgtgtgtgtatttcttccctcccctcccccctctcctcccctcccttccccacccttccctttccctcctgtggaataacactcctgtgtgtgtgtgcatgcatgtgtgtgtatatttctcacatattttcattcatgcatccgttgatggacacttgggttgattccgtgtcctggctgctgggacagtgctgcgatgaacacgagggtacagacgcctctcctacacgctaatttcaactctttggatatacacccagcagtgggattgctggatcaggtgggagctctatttccacatttttgaggaacctccctgccgtctcccatggtggctgtgccaacgacgttcccagggacagagtgcaacgggcccctttcctccatgtcctcgccaacactcgctatcttttgcgttttgatgacagtcatcc

SEQ ID NO: 1834 - protein, 323 aa, Homo sapiens
MCCLSFCAWLISLTTNALQVHRVLTNGGLALPCPALPSLPFPSLSLLSLSLSLSLSPPSLFLLWNNTPVCVCTHVCVYACVYACVCIRVCTHVCVYVCVYACVCISSLPSPPLPSPPLPSPPLPSPPLPSPPLLSPPLPFPSLWNNTRVCVCVCVCVCVCMCVYFSPSLPFPPLLPPLPSPPLPFPFCGITLVCVCVYICMCVYFSLSLPFPPLLPSLPSSVPSPPLPFPSLWDNTRVCVCVCVYACVCISSLPSPLSSPPFPTLPFPSCGITLLCVCACMCVYISHIFSFMHPLMDTWVDSVSWLLGQCCDEHEGTDASPTR

SEQ ID NO: 1835 - DNA, 1501 bp, Homo sapiens
  source
  (1)..(1501)
  CDS (201)..(1301)
  modified_base (880)..(979): a, t, c, g, unknown or other
caaccatatttttaaagctacatatacattttttccaaattaatttagttaacactgaataatgaaatccttaaatccacttatccgggtgcacacaaaatatagtaagtggcaacatgctgaagatgaatgagtatgtgagggtgggtggcctatctcaccaacctcataacgtgtggctttgacatttggagtacgtgatggtgccagcatcatcgatctggattttatctaaaaatatatatacacatacatatgtatgtatgtatgtgtatatgtatgtatgtctgtgtgtgtatgtatatgtatgtgtgtgtgtatatatatgtgtgtgtgtgtatatatatatacagggtgtgtgtgtatatatatatatatatatacagggtgtgtatatatatatatatatatatacagggtgtgtatatatatatatatatatatatacagggtgtgtatatatatatatacagggtgtgtatatatatatatacagggtgtgtatatatatatatacagggtgtgtatatatatatatacagggtgtgtatatatatatatacagggtgtgtatatatatatatacagggtgtgtatatatatatatacagggtgtgtatatatatatatacacggtgtgtatatatagtgagacacaccctgtatatatatatatacacaccctgtatatatatatatacacaccctgtatatatatatatacacaccctgtatatatatatatacacaccctgtatatatatatatacacaccctgtctatgtatacatacacacccggcaccagcaggatactcacaccttgtctctggaggcatacacagcctgccctggctattatccccacatccaaaagttgnnnnnnnnnnnnnnnnnnnnnnnnnnnnnnnnnnnnnnnnnnnnnnnnnnnnnnnnnnnnnnnnnnnnnnnnnnnnnnnnnnnnnnnnnnnnnnnnnnnngtgtgtgtgtgtatatatatacacacacacatacacatatatatatatgcacatacatgctgacaccctgtccccggtgcctgcctcctttgtctctgtccccatgccaagcagtgtgctgtcaccccgcttcagttttgagcagaagtgcacatgtggtgccacctgtgggaagtgtggtgggggtggccttgcagtcacttgtcactgcgtgagccactcccctggcctcctctgccgctgtccttcctcctatgggggaaaaggaggtggttctctcacagaactgtggctaaagggtgacagccctcaccaaaggtgagactcatgagcatcgggaagaaagtagcagtggagtgtccggttagttttctctgcggactggagcagccgggcatcagagccctgggagctcgggcaccaccagtggtcagcgctggccctggacgtccctagttcactgggccgcgtttcagcgccctctgctggctcgatggactggccgccctcgcttgcagctcc

SEQ ID NO: 1836 - protein, 366 aa, Homo sapiens
  MOD_RES (227)..(260): Variable amino acid
MVPASSIWILSKNIYTHTYVCMYVYMYVCLCVYVYVCVCVYICVCVYIYIQGVCVYIYIYIQGVYIYIYIYTGCVYIYIYIYTGCVYIYIQGVYIYIYRVCIYIYTGCVYIYIQGVYIYIYRVCIYIYTGCVYIYIQGVYIYIYTVCIYSETHPVYIYIHTLYIYIYTPCIYIYTHPVYIYIHTLYIYIYTPCLCIHTHPAPAGYSHLVSGGIHSLPWLLSPHPKVXXXXXXXXXXXXXXXXXXXXXXXXXXXXXXXXXXCVCVYIYTHTYTYIYMHIHADTLSPVPASFVSVPMPSSVLSPRFSFEQKCTCGATCGKCGGGGLAVTCHCVSHSPGLLCRCPSSYGGKGGGSLTELWLKGDSPHQR

SEQ ID NO: 1837 - DNA, 2350 bp, Homo sapiens
  source
  (1)..(2350)
  CDS (201)..(2150)
  modified_base (2)..(2): a, t, c, g, unknown or other
  modified_base (7)..(7): a, t, c, g, unknown or other
  modified_base (9)..(9): a, t, c, g, unknown or other
  modified_base (13)..(15): a, t, c, g, unknown or other
  modified_base (17)..(18): a, t, c, g, unknown or other
  modified_base (20)..(21): a, t, c, g, unknown or other
  modified_base (23)..(24): a, t, c, g, unknown or other
  modified_base (31)..(31): a, t, c, g, unknown or other
  modified_base (34)..(34): a, t, c, g, unknown or other
  modified_base (39)..(39): a, t, c, g, unknown or other
  modified_base (41)..(41): a, t, c, g, unknown or other
  modified_base (49)..(49): a, t, c, g, unknown or other
  modified_base (51)..(51): a, t, c, g, unknown or other
  modified_base (71)..(71): a, t, c, g, unknown or other
  modified_base (73)..(73): a, t, c, g, unknown or other
  modified_base (77)..(77): a, t, c, g, unknown or other
  modified_base (85)..(85): a, t, c, g, unknown or other
  modified_base (90)..(90): a, t, c, g, unknown or other
  modified_base (92)..(93): a, t, c, g, unknown or other
  modified_base (95)..(95): a, t, c, g, unknown or other
  modified_base (99)..(100): a, t, c, g, unknown or other
  modified_base (103)..(103): a, t, c, g, unknown or other
  modified_base (106)..(106): a, t, c, g, unknown or other
  modified_base (109)..(109): a, t, c, g, unknown or other
  modified_base (111)..(111): a, t, c, g, unknown or other
  modified_base (113)..(113): a, t, c, g, unknown or other
  modified_base (170)..(171): a, t, c, g, unknown or other
  modified_base (179)..(179): a, t, c, g, unknown or other
  modified_base (195)..(195): a, t, c, g, unknown or other
  modified_base (197)..(197): a, t, c, g, unknown or other
  modified_base (209)..(209): a, t, c, g, unknown or other
  modified_base (212)..(212): a, t, c, g, unknown or other
  modified_base (214)..(214): a, t, c, g, unknown or other
  modified_base (216)..(216): a, t, c, g, unknown or other
  modified_base (218)..(218): a, t, c, g, unknown or other
  modified_base (290)..(291): a, t, c, g, unknown or other
  modified_base (302)..(302): a, t, c, g, unknown or other
  modified_base (309)..(309): a, t, c, g, unknown or other
  modified_base (315)..(315): a, t, c, g, unknown or other
  modified_base (317)..(317): a, t, c, g, unknown or other
  modified_base (320)..(320): a, t, c, g, unknown or other
  modified_base (323)..(323): a, t, c, g, unknown or other
  modified_base (327)..(327): a, t, c, g, unknown or other
  modified_base (332)..(332): a, t, c, g, unknown or other
  modified_base (337)..(338): a, t, c, g, unknown or other
  modified_base (342)..(343): a, t, c, g, unknown or other
  modified_base (346)..(346): a, t, c, g, unknown or other
  modified_base (348)..(348): a, t, c, g, unknown or other
  modified_base (350)..(350): a, t, c, g, unknown or other
  modified_base (356)..(357): a, t, c, g, unknown or other
  modified_base (359)..(359): a, t, c, g, unknown or other
  modified_base (362)..(363): a, t, c, g, unknown or other
  modified_base (365)..(365): a, t, c, g, unknown or other
  modified_base (368)..(368): a, t, c, g, unknown or other
  modified_base (370)..(370): a, t, c, g, unknown or other
  modified_base (373)..(373): a, t, c, g, unknown or other
  modified_base (375)..(375): a, t, c, g, unknown or other
  modified_base (378)..(378): a, t, c, g, unknown or other
  modified_base (380)..(380): a, t, c, g, unknown or other
  modified_base (383)..(383): a, t, c, g, unknown or other
  modified_base (385)..(385): a, t, c, g, unknown or other
  modified_base (389)..(389): a, t, c, g, unknown or other
  modified_base (391)..(391): a, t, c, g, unknown or other
  modified_base (396)..(397): a, t, c, g, unknown or other
  modified_base (399)..(399): a, t, c, g, unknown or other
  modified_base (402)..(403): a, t, c, g, unknown or other
  modified_base (405)..(405): a, t, c, g, unknown or other
  modified_base (407)..(407): a, t, c, g, unknown or other
  modified_base (411)..(412): a, t, c, g, unknown or other
  modified_base (414)..(414): a, t, c, g, unknown or other
  modified_base (419)..(420): a, t, c, g, unknown or other
  modified_base (422)..(426): a, t, c, g, unknown or other
  modified_base (428)..(429): a, t, c, g, unknown or other
  modified_base (431)..(432): a, t, c, g, unknown or other
  modified_base (434)..(436): a, t, c, g, unknown or other
  modified_base (438)..(439): a, t, c, g, unknown or other
  modified_base (441)..(444): a, t, c, g, unknown or other
  modified_base (446)..(451): a, t, c, g, unknown or other
  modified_base (453)..(453): a, t, c, g, unknown or other
  modified_base (456)..(466): a, t, c, g, unknown or other
  modified_base (471)..(476): a, t, c, g, unknown or other
  modified_base (478)..(479): a, t, c, g, unknown or other
  modified_base (481)..(483): a, t, c, g, unknown or other
  modified_base (485)..(490): a, t, c, g, unknown or other
  modified_base (492)..(497): a, t, c, g, unknown or other
  modified_base (499)..(501): a, t, c, g, unknown or other
  modified_base (503)..(506): a, t, c, g, unknown or other
  modified_base (508)..(513): a, t, c, g, unknown or other
  modified_base (515)..(517): a, t, c, g, unknown or other
  modified_base (520)..(520): a, t, c, g, unknown or other
  modified_base (522)..(526): a, t, c, g, unknown or other
  modified_base (531)..(531): a, t, c, g, unknown or other
  modified_base (533)..(538): a, t, c, g, unknown or other
  modified_base (540)..(542): a, t, c, g, unknown or other
  modified_base (544)..(546): a, t, c, g, unknown or other
  modified_base (548)..(550): a, t, c, g, unknown or other
  modified_base (552)..(556): a, t, c, g, unknown or other
  modified_base (558)..(560): a, t, c, g, unknown or other
  modified_base (564)..(564): a, t, c, g, unknown or other
  modified_base (566)..(568): a, t, c, g, unknown or other
  modified_base (570)..(575): a, t, c, g, unknown or other
  modified_base (577)..(579): a, t, c, g, unknown or other
  modified_base (582)..(584): a, t, c, g, unknown or other
  modified_base (586)..(593): a, t, c, g, unknown or other
  modified_base (595)..(602): a, t, c, g, unknown or other
  modified_base (606)..(612): a, t, c, g, unknown or other
  modified_base (614)..(618): a, t, c, g, unknown or other
  modified_base (620)..(623): a, t, c, g, unknown or other
  modified_base (625)..(627): a, t, c, g, unknown or other
  modified_base (629)..(631): a, t, c, g, unknown or other
  modified_base (633)..(634): a, t, c, g, unknown or other
  modified_base (636)..(637): a, t, c, g, unknown or other
  modified_base (639)..(639): a, t, c, g, unknown or other
  modified_base (641)..(645): a, t, c, g, unknown or other
  modified_base (647)..(649): a, t, c, g, unknown or other
  modified_base (651)..(653): a, t, c, g, unknown or other
  modified_base (655)..(660): a, t, c, g, unknown or other
  modified_base (662)..(667): a, t, c, g, unknown or other
  modified_base (669)..(672): a, t, c, g, unknown or other
  modified_base (674)..(677): a, t, c, g, unknown or other
  modified_base (680)..(682): a, t, c, g, unknown or other
  modified_base (684)..(688): a, t, c, g, unknown or other
  modified_base (695)..(697): a, t, c, g, unknown or other
  modified_base (699)..(703): a, t, c, g, unknown or other
  modified_base (705)..(711): a, t, c, g, unknown or other
  modified_base (713)..(715): a, t, c, g, unknown or other
  modified_base (717)..(718): a, t, c, g, unknown or other
  modified_base (720)..(721): a, t, c, g, unknown or other
  modified_base (724)..(730): a, t, c, g, unknown or other
  modified_base (732)..(735): a, t, c, g, unknown or other
  modified_base (737)..(741): a, t, c, g, unknown or other
  modified_base (743)..(746): a, t, c, g, unknown or other
  modified_base (748)..(751): a, t, c, g, unknown or other
  modified_base (753)..(756): a, t, c, g, unknown or other
  modified_base (759)..(776): a, t, c, g, unknown or other
  modified_base (778)..(779): a, t, c, g, unknown or other
  modified_base (781)..(880): a, t, c, g, unknown or other
  modified_base (941)..(941): a, t, c, g, unknown or other
  modified_base (1089)..(1089): a, t, c, g, unknown or other
  modified_base (1199)..(1199): a, t, c, g, unknown or other
  modified_base (1327)..(1327): a, t, c, g, unknown or other
  modified_base (1332)..(1332): a, t, c, g, unknown or other
  modified_base (1337)..(1338): a, t, c, g, unknown or other
  modified_base (1343)..(1343): a, t, c, g, unknown or other
  modified_base (1348)..(1349): a, t, c, g, unknown or other
  modified_base (1354)..(1355): a, t, c, g, unknown or other
  modified_base (1361)..(1362): a, t, c, g, unknown or other
  modified_base (1368)..(1369): a, t, c, g, unknown or other
  modified_base (1376)..(1377): a, t, c, g, unknown or other
  modified_base (1384)..(1384): a, t, c, g, unknown or other
  modified_base (1393)..(1393): a, t, c, g, unknown or other
  modified_base (1395)..(1395): a, t, c, g, unknown or other
  modified_base (1468)..(1468): a, t, c, g, unknown or other
  modified_base (1470)..(1470): a, t, c, g, unknown or other
  modified_base (1472)..(1472): a, t, c, g, unknown or other
  modified_base (1474)..(1474): a, t, c, g, unknown or other
  modified_base (1476)..(1476): a, t, c, g, unknown or other
  modified_base (1478)..(1478): a, t, c, g, unknown or other
  modified_base (1485)..(1485): a, t, c, g, unknown or other
  modified_base (1491)..(1491): a, t, c, g, unknown or other
  modified_base (1493)..(1493): a, t, c, g, unknown or other
  modified_base (1495)..(1495): a, t, c, g, unknown or other
  modified_base (1497)..(1497): a, t, c, g, unknown or other
  modified_base (1499)..(1499): a, t, c, g, unknown or other
  modified_base (1508)..(1508): a, t, c, g, unknown or other
  modified_base (1510)..(1510): a, t, c, g, unknown or other
  modified_base (1519)..(1519): a, t, c, g, unknown or other
  modified_base (1521)..(1521): a, t, c, g, unknown or other
  modified_base (1528)..(1528): a, t, c, g, unknown or other
  modified_base (1530)..(1530): a, t, c, g, unknown or other
  modified_base (1539)..(1539): a, t, c, g, unknown or other
  modified_base (1616)..(1617): a, t, c, g, unknown or other
  modified_base (1619)..(1619): a, t, c, g, unknown or other
  modified_base (1624)..(1625): a, t, c, g, unknown or other
  modified_base (1627)..(1628): a, t, c, g, unknown or other
  modified_base (1633)..(1633): a, t, c, g, unknown or other
  modified_base (1636)..(1636): a, t, c, g, unknown or other
  modified_base (1638)..(1639): a, t, c, g, unknown or other
  modified_base (1647)..(1647): a, t, c, g, unknown or other
  modified_base (1650)..(1650): a, t, c, g, unknown or other
  modified_base (1653)..(1653): a, t, c, g, unknown or other
  modified_base (1767)..(1767): a, t, c, g, unknown or other
  modified_base (1771)..(1771): a, t, c, g, unknown or other
  modified_base (1775)..(1775): a, t, c, g, unknown or other
  modified_base (1778)..(1779): a, t, c, g, unknown or other
  modified_base (1782)..(1782): a, t, c, g, unknown or other
  modified_base (1785)..(1786): a, t, c, g, unknown or other
  modified_base (1789)..(1790): a, t, c, g, unknown or other
  modified_base (1793)..(1795): a, t, c, g, unknown or other
  modified_base (1797)..(1799): a, t, c, g, unknown or other
  modified_base (1803)..(1803): a, t, c, g, unknown or other
  modified_base (1807)..(1807): a, t, c, g, unknown or other
  modified_base (1809)..(1809): a, t, c, g, unknown or other
  modified_base (1811)..(1811): a, t, c, g, unknown or other
  modified_base (1813)..(1813): a, t, c, g, unknown or other
  modified_base (1815)..(1815): a, t, c, g, unknown or other
  modified_base (1817)..(1817): a, t, c, g, unknown or other
  modified_base (1819)..(1819): a, t, c, g, unknown or other
  modified_base (1821)..(1821): a, t, c, g, unknown or other
  modified_base (1824)..(1824): a, t, c, g, unknown or other
  modified_base (1826)..(1826): a, t, c, g, unknown or other
  modified_base (1828)..(1828): a, t, c, g, unknown or other
  modified_base (1830)..(1830): a, t, c, g, unknown or other
  modified_base (1832)..(1832): a, t, c, g, unknown or other
  modified_base (1834)..(1834): a, t, c, g, unknown or other
  modified_base (1837)..(1837): a, t, c, g, unknown or other
  modified_base (1839)..(1839): a, t, c, g, unknown or other
  modified_base (1841)..(1841): a, t, c, g, unknown or other
  modified_base (1843)..(1843): a, t, c, g, unknown or other
  modified_base (1846)..(1846): a, t, c, g, unknown or other
  modified_base (1848)..(1848): a, t, c, g, unknown or other
  modified_base (1851)..(1851): a, t, c, g, unknown or other
  modified_base (1853)..(1853): a, t, c, g, unknown or other
  modified_base (1855)..(1855): a, t, c, g, unknown or other
  modified_base (1858)..(1858): a, t, c, g, unknown or other
  modified_base (1860)..(1861): a, t, c, g, unknown or other
  modified_base (1863)..(1863): a, t, c, g, unknown or other
  modified_base (1865)..(1866): a, t, c, g, unknown or other
  modified_base (1868)..(1868): a, t, c, g, unknown or other
  modified_base (1871)..(1871): a, t, c, g, unknown or other
  modified_base (1873)..(1873): a, t, c, g, unknown or other
  modified_base (1876)..(1876): a, t, c, g, unknown or other
  modified_base (1885)..(1885): a, t, c, g, unknown or other
  modified_base (1887)..(1887): a, t, c, g, unknown or other
  modified_base (1909)..(1909): a, t, c, g, unknown or other
  modified_base (1929)..(1929): a, t, c, g, unknown or other
  modified_base (2128)..(2128): a, t, c, g, unknown or other
  modified_base (2145)..(2145): a, t, c, g, unknown or other
  modified_base (2153)..(2153): a, t, c, g, unknown or other
  modified_base (2159)..(2161): a, t, c, g, unknown or other
  modified_base (2163)..(2165): a, t, c, g, unknown or other
  modified_base (2168)..(2169): a, t, c, g, unknown or other
  modified_base (2172)..(2174): a, t, c, g, unknown or other
  modified_base (2177)..(2178): a, t, c, g, unknown or other
  modified_base (2180)..(2182): a, t, c, g, unknown or other
  modified_base (2188)..(2189): a, t, c, g, unknown or other
  modified_base (2192)..(2193): a, t, c, g, unknown or other
  modified_base (2195)..(2196): a, t, c, g, unknown or other
  modified_base (2199)..(2199): a, t, c, g, unknown or other
  modified_base (2201)..(2201): a, t, c, g, unknown or other
  modified_base (2205)..(2205): a, t, c, g, unknown or other
  modified_base (2208)..(2209): a, t, c, g, unknown or other
  modified_base (2214)..(2214): a, t, c, g, unknown or other
  modified_base (2218)..(2218): a, t, c, g, unknown or other
  modified_base (2220)..(2220): a, t, c, g, unknown or other
  modified_base (2223)..(2223): a, t, c, g, unknown or other
  modified_base (2226)..(2226): a, t, c, g, unknown or other
  modified_base (2229)..(2229): a, t, c, g, unknown or other
  modified_base (2231)..(2231): a, t, c, g, unknown or other
  modified_base (2234)..(2234): a, t, c, g, unknown or other
  modified_base (2236)..(2237): a, t, c, g, unknown or other
  modified_base (2242)..(2242): a, t, c, g, unknown or other
  modified_base (2246)..(2247): a, t, c, g, unknown or other
  modified_base (2251)..(2251): a, t, c, g, unknown or other
  modified_base (2254)..(2254): a, t, c, g, unknown or other
  modified_base (2256)..(2256): a, t, c, g, unknown or other
  modified_base (2260)..(2260): a, t, c, g, unknown or other
  modified_base (2265)..(2265): a, t, c, g, unknown or other
  modified_base (2267)..(2267): a, t, c, g, unknown or other
  modified_base (2269)..(2269): a, t, c, g, unknown or other
  modified_base (2273)..(2273): a, t, c, g, unknown or other
  modified_base (2275)..(2275): a, t, c, g, unknown or other
  modified_base (2277)..(2277): a, t, c, g, unknown or other
  modified_base (2285)..(2285): a, t, c, g, unknown or other
  modified_base (2289)..(2289): a, t, c, g, unknown or other
  modified_base (2297)..(2297): a, t, c, g, unknown or other
  modified_base (2334)..(2334): a, t, c, g, unknown or other
  modified_base (2340)..(2340): a, t, c, g, unknown or other
  modified_base (2345)..(2345): a, t, c, g, unknown or other
tncggtncngtannncnnanncnnacttttnccntgccnancaagcgtnangttacttttactgaatgatngnaagnaagatagnaagtnanntnatgnnatngangtncntnctacttttacctgcatcatcatcatcatcatcatcatcatctgctgacacgacacgnncttttcangacacgacatgatgtnantttatgatgatngtnantnangccggtccctgcaccatcacatcgacgtaccatttcatgcatctactttctgcacgatcttcgatgatgtanntttattgttgnttgttgnttgatngnatngtngtantttanttcannacgnnacngncngaccanncnacnnancgnancgnancgnancgnangcangnaccanngncgnncngnacanngnacganngnnnnnanncnngnnnanngnnnncnnnnnncngcnnnnnnnnnnngatgnnnnnngnnannngnnnnnnannnnnngnnngnnnngnnnnnngnnnaangnnnnngcccngnnnnnngnnnannngnnnannnnnannnaggnannnannnnnngnnnaannngnnnnnnnnannnnnnnngacnnnnnnnannnnngnnnngnnngnnngnngnnangnnnnngnnngnnngnnnnnngnnnnnngnnnngnnnngannngnnnnngcctttnnngnnnnngnnnnnnngnnngnngnnagnnnnnnngnnnngnnnnngnnnngnnnngnnnngannnnnnnnnnnnnnnnnngnnannnnnnnnnnnnnnnnnnnnnnnnnnnnnnnnnnnnnnnnnnnnnnnnnnnnnnnnnnnnnnnnnnnnnnnnnnnnnnnnnnnnnnnnnnnnnnnnnnnncccccccctccccccccccccccctcccccccccccccccccccccctttttttttttttnttttttttttttttttttttttttttttttttttttttttttttttttttttttcccctctccccccccccccccccccccccccccccccccccccccccccccccccccccctttttttttttttttttttttttttttttttttnttttttttttttttttttttttttttttttttttatttccccccccccccccccccccccccccccccccccccccccccccccccccccgccccccccccttttttttntttttttttttttttttttttttttttttttttttttttttttttttttttttttttttttttcttcttctccccccccccctccccccccccccccccccccccccccccccccccccccccccctnttttnttttnnttttnttttnnttttnntttttnntttttnntttttannttttttnttttttttntnttttttctccctcttctctctctctcctctctctctctctctctctctctctctctctctctctctctctctntntntntntntatatantttttntntntntnttttttttntnttttttttntnttatttntnttttttctnttttcccttttcccttttcccttcccctctcccctccccttcccctcccccccccccccccccccccccctcctctnntnttttnntnntttanttntnnttttttanttnttntttttttttttttttttttttttttttttttttttttcttcttttttcttcttcttctccctttccttccccctcctcctcctccctcccccctccctcctcctccctctattntttntttnttnnttnttnnttnnttnnntnnnttcnttcntncntncntncntncgntncntncntncgntncntncgntncgntncntancnntncnntncgntngcnttcgcttcncnattcgtttcgctatcccttttnctatttctatttcgtttttnccttttcctttttcccttttttcccttttttccctttttttccccttttttcccccttttttttccccctcttttttttcccccccctttttttttttttccccccccccccccctccttttttttttttttttttttttttttttatttttttttttccccctttttttttttttttttttccccttttttttttttncctttttataagccctnattaggcngttttnnncnnnttnngcnnnttnncnnnttgcgnnttnncnnttncnttancgnnttcgnattncnttncgnttncnttncnnttcgnttcnnttcnttncnttcnttcgntncnttcntncnttcgttcnttcnttcttcgnttcttcttcattcgtcattcttcatcatcgtgcttcnttatcnttttnctgaa

SEQ ID NO: 1838 - protein, 649 aa, Homo sapiens
  MOD_RES (3)..(3): Variable amino acid
  MOD_RES (5)..(6): Variable amino acid
  MOD_RES (30)..(31): Variable amino acid
  MOD_RES (34)..(34): Variable amino acid
  MOD_RES (37)..(37): Variable amino acid
  MOD_RES (39)..(40): Variable amino acid
  MOD_RES (43)..(44): Variable amino acid
  MOD_RES (46)..(46): Variable amino acid
  MOD_RES (48)..(50): Variable amino acid
  MOD_RES (52)..(53): Variable amino acid
  MOD_RES (55)..(55): Variable amino acid
  MOD_RES (57)..(60): Variable amino acid
  MOD_RES (62)..(64): Variable amino acid
  MOD_RES (66)..(69): Variable amino acid
  MOD_RES (71)..(89): Variable amino acid
  MOD_RES (91)..(109): Variable amino acid
  MOD_RES (111)..(120): Variable amino acid
  MOD_RES (122)..(134): Variable amino acid
  MOD_RES (136)..(163): Variable amino acid
  MOD_RES (165)..(227): Variable amino acid
  MOD_RES (247)..(247): Variable amino acid
  MOD_RES (297)..(297): Variable amino acid
  MOD_RES (333)..(333): Variable amino acid
  MOD_RES (376)..(376): Variable amino acid
  MOD_RES (378)..(381): Variable amino acid
  MOD_RES (383)..(383): Variable amino acid
  MOD_RES (385)..(385): Variable amino acid
  MOD_RES (387)..(388): Variable amino acid
  MOD_RES (390)..(390): Variable amino acid
  MOD_RES (392)..(393): Variable amino acid
  MOD_RES (395)..(395): Variable amino acid
  MOD_RES (398)..(399): Variable amino acid
  MOD_RES (423)..(426): Variable amino acid
  MOD_RES (429)..(429): Variable amino acid
  MOD_RES (431)..(433): Variable amino acid
  MOD_RES (436)..(437): Variable amino acid
  MOD_RES (440)..(441): Variable amino acid
  MOD_RES (443)..(444): Variable amino acid
  MOD_RES (447)..(447): Variable amino acid
  MOD_RES (473)..(473): Variable amino acid
  MOD_RES (475)..(476): Variable amino acid
  MOD_RES (478)..(480): Variable amino acid
  MOD_RES (483)..(485): Variable amino acid
  MOD_RES (523)..(533): Variable amino acid
  MOD_RES (535)..(556): Variable amino acid
  MOD_RES (558)..(559): Variable amino acid
  MOD_RES (562)..(563): Variable amino acid
  MOD_RES (570)..(570): Variable amino acid
  MOD_RES (577)..(577): Variable amino acid
  MOD_RES (643)..(643): Variable amino acid
  MOD_RES (649)..(649): Variable amino acid
MMXVXXAGPCTITSTYHFMHLLSARSSMMXXYCXLLXDXXVVXXFXTXXXDXXTXRXXXXRXXXPXXXXTXXXXXXXXXXXXXXXXXXXMXXXXXXXXXXXXXXXXXXXPXXXXXXXXXXRXXXXXXXXXXXXXDXXXXXXXXXXXXXXXXXXXXXXXXXXXXPXXXXXXXXXXXXXXXXXXXXXXXXXXXXXXXXXXXXXXXXXXXXXXXXXXXXXXXXXXXXXXXPPLPPPPPPPPPPPPLFFFXFFFFFFFFFFFFFFFFFFPLSPPPPPPPPPPPPPPPPPFFFFFFFFFFFXFFFFFFFFFFLFPPPPPPPPPPPPPPPPPRPPPFFXFFFFFFFFFFFFFFFFFFFFFLLLPPPLPPPPPPPPPPPPPPXFXXXXFXFXFXXFXFXXFXFFXXFSPSSLSLLSLSLSLSLSLSLSLXXXXYIXFXXXFFXXFFXXIXXFSXFPFPFSLPLSPPLPLPPPPPPPPPLXFXXFXXXFLXXXFFFFFFFFFFFFFFFLLLLPFLPPPPPPSPLPPPPSIXXXXXXXXXXXFXXXXXXXXXXXXXXXXXXXXXXRXXSLXXSFRYPFXYFYFVFXFSFFPFFPFFPFFPLFSPFFFPLFFFPPLFFFFPPPPPPFFFFFFFFFIFFFPPFFFFFFPLFFFXLFISPX

SEQ ID NO: 1839 - DNA, 1297 bp, Homo sapiens
  source
  (1)..(1297)
  CDS (201)..(1097)
ttctctttttcttcttcttcttcttcttcttcttcttcttcttcttcttcttcttcttcttcttttttttttgagacagagtttcactcttgttgcccaggctagagggcaatggcgcgatctcggctcaccgcaccctccgcctcccaggttcaagcgattctcctgcctcagcctcctgattagctgggattacaggcatgggccaccgtgcctggctgatgtttgtacttttagtagagacggtgtttttccatgttggtcaggctggtctcccactcccaacctcaggtggtccgcctgccttagcctcccaaagtgctgggatgacaggcgtgagccaccgcgcccagcctctctctctctctctctctctctctctctctctctctctctcgctcgcttgcttgcttgctttcgtgctttcttgctttcccgttttcttgctttctttctttctttcgtttctttcatgcttgctttcttgcttgcttgcttgctttcgtgctttcttgctttcctgttttctttttctttctttctttctttctttctattgtttctttcttgcttgctttcttgcttgcttgcttgctttcgtgctttcttgctttcctgttttctttctttctttctttcttttgtttctttcttgcttgctttcttgcttgcttgctttcgtgctttcttgttttctcgctttctttctttcttttgtttctttcctgcttgctttcttgcttgattgctttcgtgctttcttgctttcttgttttctttctttcttttgtttctttctttcttgcttccttgttttcttgctttcttgcttgcttgctttcgtgctttcttgctttcttgctttctttcttttgtttctttcttgcttgctttcttgcttccttgttttcttgctttcttgcttgcttgctttcgtgctttcttgctttcttttctttctttcttttctttttctttctttctttctttcttgctttcttttctttcattcattccttctttcttttctttctttcttccttccttccttccttccttccttcctttctttctttctttctgtttcgtccttttgagacagagtttcactcttgtttccacggctagagtgcaatggcgcgatcttggctcaccgcaccttccgcctcccgggttcgagcgcttctcctgcctcagcctcccgattagcggggatgacagggaggcacccccacgcctggcttggctgatgtttgtgtttttagtaggcacgccgtgtctctccatgttgctcagg

SEQ ID NO: 1840 - protein, 298 aa, Homo sapiens
MGHRAWLMFVLLVETVFFHVGQAGLPLPTSGGPPALASQSAGMTGVSHRAQPLSLSLSLSLSLSLSLACLLAFVLSCFPVFLLSFFLSFLSCLLSCLLACFRAFLLSCFLFLSFFLSFYCFFLACFLACLLAFVLSCFPVFFLSFFLLFLSCLLSCLLAFVLSCFLAFFLSFVSFLLAFLLDCFRAFLLSCFLSFFCFFLSCFLVFLLSCLLAFVLSCFLAFFLLFLSCLLSCFLVFLLSCLLAFVLSCFLFFLSFLFLSFFLSCFLFFHSFLLSFLSFFLPSFLPSFLSFFLSVSSF

SEQ ID NO: 1841 - DNA, 1294 bp, Homo sapiens; identical to SEQ ID NO: 1795
  source
  (1)..(1294)
  CDS (201)..(1094)

SEQ ID NO: 1842 - protein, 297 aa, Homo sapiens; identical to SEQ ID NO: 1796

SEQ ID NO: 1843 - DNA, 1717 bp, Homo sapiens
  source
  (1)..(1717)
  CDS (201)..(1517)
  modified_base (652)..(652): a, t, c, g, unknown or other
  modified_base (1260)..(1260): a, t, c, g, unknown or other
  modified_base (1355)..(1454): a, t, c, g, unknown or other
cagcagcaggtctgtcttcccagcgtggagggtgagtccagcacagcagcacccagagggtcccgcaggatcccagcccagtgcccggggagaggagggctgtcagctgtggcggggaggtccacagtccagtttcccgaaagcaaaggagtccctcaggctgggaagtttcgcatgactgctccttctcctattacctcatgctagccctccccactctaagaccctcacgccaggaccctccaccctcagaccctctcaccaggaccctccaccctcagaccctcacaccaggaccctccaccctcagaccctcacaccaggaccctccaccctcagaccctcacaccaggaccctcctccctcagactctcataccaggaccctcctccctcagactctcacaccgggaccctcctccctcagaccctcatgccaggaccctcctccctcagactctcacaccaggtcctttccaccttcagatcctcacctcaggacactgcatctacacaggacggcacccagccccatgtgacacatacagacatgctccccagactcagggaatgatccagagtgaccaagacgggcacaaggaagggcaaacagtcctgcctcgggaggagatcatgcatggaatcttccctantctttttctcccccacctctcttcccctctcttcttttacattcccttttattttctcttttccctttcccccttttttttttttttccctctctttttctcttctctctccatcccccaccccctttacctacttttttttttccccctctcctcctcccttcttctctttcttctttttttttttcttcactccctctttttctcctttttttttaacaaccattctccttccctccctcctctcccaccacctttctcaccttctttttttcttttttttttcttttcttttttttttttttattttttttttttttttcatttttctcctctcctttttatttttcttttctccttttttacccttatctcttcttattattctctctttcttttttctctttcctttttcttttttttttttcttttctcttctcttcttctctttcttttcctcttttcttttctcatcccccccttcttcttccttatcttctctctttctcctcttttctcttcttttatcctctttcttctttttcattcttctttcctttcttttttttttttttttttccctcttcatcctccctctcctttcctcnttttcctccttctctttctccttcttcctctcctattccttatcatctcttctccctcattttccttgtttttctctcttttcattttcttattnnnnnnnnnnnnnnnnnnnnnnnnnnnnnnnnnnnnnnnnnnnnnnnnnnnnnnnnnnnnnnnnnnnnnnnnnnnnnnnnnnnnnnnnnnnnnnnnnnnngcagactcttttcttccatttcacatctttctgaccaaagccggcgaaggtctgcgctgttaagaccccccccacacaccatcccggattatctcccgcctcacagcgtgggctcttaatcatacctgcaacgtttctgtgccatggcaggtgatacggccgtaggttctgggaatcagggcatggacatgtcagggtcagggctctgctgaccacgcggagcaagtaaaacatacacagctcgttgccacggctaaaactcc

SEQ ID NO: 1844 - protein, 438 aa, Homo sapiens
  MOD_RES (151)..(151): Variable amino acid
  MOD_RES (354)..(354): Variable amino acid
  MOD_RES (385)..(418): Variable amino acid
MLALPTLRPSRQDPPPSDPLTRTLHPQTLTPGPSTLRPSHQDPPPSDPHTRTLLPQTLIPGPSSLRLSHRDPPPSDPHARTLLPQTLTPGPFHLQILTSGHCIYTGRHPAPCDTYRHAPQTQGMIQSDQDGHKEGQTVLPREEIMHGIFPXLFLPHLSSPLFFYIPFYFLFSLSPFFFFFPLFFSSLSIPHPLYLLFFFPLSSSLLLFLLFFFLHSLFFSFFFNNHSPSLPPLPPPFSPSFFLFFFFSFFFFYFFFFFHFSPLLFIFLFSFFTLISSYYSLFLFSLSFFFFFFLFSSLLLFLFLFSFLIPPFFFLIFSLSPLFSSFILFLLFHSSFLSFFFFFFPLHPPSPFLXFLLLFLLLPLLFLIISSPSFSLFFSLFIFLXXXXXXXXXXXXXXXXXXXXXXXXXXXXXXXXXXADSFLPFHIFLTKAGEGLRC

SEQ ID NO: 1845 - DNA, 1249 bp, Homo sapiens
  source
  (1)..(1249)
  CDS (201)..(1049)
tacaacaattagccaggcatggtggcccgtacctgtagtccgagctactcaggaggctgatgcaggagaagcacttgaacctggggatcggaggttgcactgagctgagattgcaccactgcactccagcctgagtggcagagcaacactccatctcaaaaaataaaataaaatcaaaataaaaacacacttgaatatatatgtgtgtgtgtatatatatatgtatatgggatacatatataccccatatatatgtatatcccatatacgtataccccatatatatgtatatcccatatacgtatacccatatatatgtatatcccatatacgtataccccatatatatgtatatcccatatacgtataccccatatatatgtatatcccatatacgtataccccatatatatgtatatcccatatacgtataccccatatatatgtatatcccatatacgtataccccatatatatgtatatcccatatacgtataccccatatatatgtgtatcccatatacgtataccccatatatatgtatagcccatatacgtataccccatatatatgtatatcccatatacgtataccccatatatatgtatatcccatatacgtataccccatatatatgtatatcccatatacgtataccccatatatatgtatatcccatatacgtataccccatatatatgtatatcccatatacgtataccccatatatatgtatatcccatatacgtataccccatatatatgtatatcccatatacgtataccccatatatatgtatatcccatatacgtataccccatatatatgtatatcccatatacgtataccccatatatatgtatatcccatatacgtataccccatatatatgtatatcccatatacgtataccccatatatatgtatatcccatatacgtataccccatatatatgtatatcccatatacgtataccccatatacatatacgtatatcccatatacatatatgtatatcccatatatgtatatatacatatatataaacacacacacacaggatatatatatatatacacacacaggatatatatatatatacagacacaggatatttatatatacacacacaggatatatatatgggatatacgtatatgggtgatacatatatatgggatatacgtatatgggttatacatatatgggatacacgtatatgggttatacatatatatgggatact

SEQ ID NO: 1846 - protein, 282 aa, Homo sapiens [sequence omitted]

SEQ ID NO: 1847 - DNA, 6546 bp, Homo sapiens
  source
  (1)..(6546)
  CDS (201)..(341)
  CDS (5505)..(5936)
  CDS (6164)..(6346)
aacaaaaacgaagtaaagtgggagacgaaaaaagaaaactatttgtgaatggtttgaatgccatactaaagagttcagaattttaaagctaatccatgtctttttcttttaggattaaaataatgcagaatattggagttacatttattcaggctggtcagtattcagatgctattaattcatatgagcacataatgagcatggcaccaaatctgaaggcaggctacaacctaactatctgttattttgctattggagaccgagaaaaaatgaagaaggcattccaaaaattgattactgttccattagaaattgatgaagataaatatatttcaccaagtgtgagtatgaaaaagacatttctgtagccacttcccacttatctgtgcttttctgttttcagaatgagaaagccagaatagatgacttcttgggtttttcccaggcctgtatcaatgtgttttattattgatgtatttcattttttatttaaattgggttgagaatgagactctattgaaatggggtagagattatggttaaaacagactgcacaattttagtaaaaaaatcattaaaaataagattccatgtcattcattaagcataatatcttttttttttttttttttttgagacagagagcctgccttccaggctggagtgcagtggtgcagtctcagctcactgcaatctctgcctcccaggctctggcaattctcatgcctcagcctcctgagtagctgggattacaggcatgcgccaccatgcccggctaagttttttatttttagtagagaaggggttttgccatgttgcccaggctggtcttgaactcctggcctcatgtgatccacctgcctccactttccaaagtgctgggattacaggtatgagcctggccaagggtaatatcttgaccaagaaacctccaaatccttatttcacctattaagagccattgtggagcagagggaacctcaactgtgtataaatatctcaagagcgaaggctgggcgcagtggctcacacctgtaattccagcactttgggaggctgaggtgggcagattgcgaggtcagtagtttgagaccagcctgaccaacagggcgaaatgctgtctctaccgaaaatacaaaaattagctgggtatggtggtgggcgcctgtaatcccagctacttgggaggctgaggcaggagaattgcttgaacttgggaggtggaggttgcagtgagccaagattgtgccactgcactccatcctgggtgacagagcaagactctgtcttgaaaaaaaaaaagtgaaataaattccttatccttactcatagagtggaacataatgcagttatcaaaagtcatattttcaaacacctagagaaatattatataatgttaagtgaaaacatacagctatgcacacttatacatgaacataaactggaagaattgacaccaatataaaacagtagtttctgagctatgagattgtaaatgcttttgaaatattttccagatttttacaaataaaatattggcatactgtatattagtttaaggaaaattgcctctatttgtagataaaaatggtacattttcaatttcacagagttgaacttttaatagattttcttaacagattatattagctgggcatggtggcgggtgcctgtaatcccagttactagggaggctgaggcaggagaatcacttgaacccggaaggtggaggttgcaggagccgagatcgcactattcactccagcctgggtgacaagagcaaaactccatctcaaaaaaaaaaaaaaaaagattataagagtactgtagcatagcagagtataggctctgaagccagatgccttggctctcctactcagctcttactctccctgtgtctcagttcttttatatatgtaatgggattaactattataacctatcttacagggttaaggtgaggattataggtgaggattaaatgagttaatgcatgtgaaatgcttaaaatagtacctggcagctgggcacagtggctcacacctgtaatcccagcactttgggaggccgaggtgggaggattgcttgagcctgagagttcaagatcagcctgcgcaacatggcgaaactccatctctacaaaaaaatacgaaaattagccaggcttgatgttgcacacctgtagtcccagctacttgggaggctgaggtggaaggatcacctgagcccgaggaggtcaaggctgcagtgagccgtgatcacacccctgcacactagctttgggtgacagagtaagaccttgtctcaaaaaaaaaaaaaatagccagcctggtggtgtgcacctgtagtcccagctactttgaaggttgagggggaagatcatctaagcccggggaggtcaaggttttagtaagttgtgaatcacacatgcttctccagcctggatgacagagtgagaccttgtctcaaaagtaaaataccaaataaaaaaaatatatattagccaggcatggtggcacatgtctgtagtcccacctactcgagaagctgagtgggaagatggcttgagcccagaagttgagactgcagtgacccatgatcatgccacagtgctccagtctgggcaacagagcaagactctgtctcaaaacaaaactaaccaaacaaaaaaaatgtatgtgaaagatagttaagtgctgggcaaatgttaattattatatattattttcatattgagaaaaaataatatatgttgtaaaatcatctgtgtttttaatggggagtagagatatggatcatactaagtaattgatgattgaagcatttatatttgagtttagaattaaagtattacatatttgtactaacaaccccagcttctgtgtacttggtcctaatctttccatcctgatccttttatcagcttcttagaataggttagttcaatggagaatgtgattggtaatcagaaatatgaaaaagaaagttctaatttacataagggaaaatagaaggattaatttactctcccttttttaaaactaattagtagggaggcttattggaaattcaagttcgtggctggacatgatggcttatgcctatagtcccaatactttgaaaggctgaggtgagcaaattgcttgagccaaggaattgaagaccagcctgggcaaaatggtgaaacctcatctctacaaaaaatacaaaaattagccaggcatcatggcatgcccctgtagtcccagctacttgggaggctgaggtgggaggatcacctgagcccagggaggtggaggctgcagtgagccatgatcatgccactgcactgcagcctgggcaatagagtgaggctgtatctcaaaacaaaacaaaacaaaaattaagttcttgctgtttacttctgaattattctttttttcttccattttattttaccaggatgatcctcatactaacttagtaactgaagctataaaaaatgatcacctcagcaaatggaacgtgaaaggtaatattttaaacttaataacgtagttattaattacattatttaaaatatttaatgtttagtattaagatacttaatatttgaaacttaaaataatttagttttaatttttataaaagggttgaatgtgcattctgtttcttacagaacttgttatattcaatatatttcttgaatagtgctattatttcaccatttttatacttactggttctcttttctcattcagaataatctcagtgctcatgctaatctcaattactcaatctcagttattctgtcagttgtttccctctgcatttggtacattattggaactttgtttatcttacctttatttcaaaaatgacgtctttatgtttttttatcctgcctcacaattaaggatcagctctcagagacaaaattctatttatttcatttcttccttcctctaatatggtactacaacttgtttctacttacaacacttctgacaccaaatgtgtggtttttctcacaccaacaaccaattatccatctccctggacaccaagggcttagtcccacaagactactaccctgttcctcactacagatgccagttgtaagcctgtaagcctgggcctcctgaactcctgactgacctgctatgaatggaaggctcccactaccccctcctcagggtcagtagttttctaggagagctcacaaaactcaggaaaatactttatttgtacttaccacgttattataaaggatacaactcagagacaaccaaatggaagagctgcatagggcagaatatgggggaagtagtgcagagcctctgttgactttctgggtgcaccaccctcccagcacctccgtgtgttcatcaacctggaaactctctgaactgtgtcatttagggtttatatgtaggtttcatgatgtaggcatgatttttatcattggccattggtgattgaactcagtctgcagcctttctcccttcgctggagattgagggtggaattaaaagtacaactggggtggtgtcagaaaaggccaagtggggagctaagactttaacccctaaagcctgttccattcctctgatgtcagtggatgacacgtggggagcctggaattccacccctacccagcagtactgaagcatcccccaaccctttctccttgggtagtgtcagaggaggcttagtggagcgtcagggctttaactgtcacccagttgtaacaaagccctcctatcatgatgttagtaggacggactattttgggaagcaagaactcccaccctgcccaatagatacaaggacccctctgcctattctgggtgtcaaccggaggccatgtggcaggggctggatttccaccttcacctggcagtggcaaggtggagtgtctccttcctctgctggagtggtatccagaaagccagctaaaacgatacttaaaatccagggtctcataattcagaaatgtccaagtgttcattaagaatcattgtttgctgggcacggtggctcacgcctgtagtcccagcactttgggaggctgagccgggtagataacctgaggtcaaaagttcgagaccagcctgaccaatatggtgaaacctcatctttactaaaaatacaaaaattagccaggcatggtggcatgtgcatgtagtcccagctactcaagaggctgggacaggagaattgcttgaacccaggaggcggaggttgcagtgagtgctaagatagtgctactgcactccaggctgggtgacagagcaggactccatctcaaaaaataaaataaataaataaataaaatagtgtgaatagccctataaatcttaaggacattgaatgatgcttttaaaactctgaaaaaagaaacctatctctaggcccagatgggttttactggagaattctattaagaatttatatcaggggcaggaaggggcagccacttgggcaggatggcggcggctacagtgggcaatgtggtcaactaggtgatcctgagtgccttcctgttcccggtgactgtgtccttgtgccacatcctggtactgtacgtggggctcctgctgctgctgcacgcctggcgcttgccccctgcaccgcccatctcaggccccgggcccagtctgcattcgtcccctggcctgctgctgccgcagcacttctacccgtactgcgtgctgccactcaccttcggcaagtacttcgcatccctgtcagtgcacgtcagcttctggaaggtgcccatgtcctatgcacacaccattaaggccaccatgcccatttgggtggtcctcctgtcccagatcattataaagaagcagagcaacaaggtgtacttgtcactcatccccatcatcagcggcgtcctgatggccacggtcaccaagttgtcttttgacatgtggggaggccgccacgctgtgcttcttgtttcagaacattttctccaaaaagatcttgagagatttgcggatccaccatctcccgctgctcaacatcttgggctgccacgctgtttttttatgatccccacctgggttctggtggacctctcagctttcctggtcagcagcgacttgactacgtctcacagtggccctggatgctcctgcttctggctgtcagcggcttctgtaactttgcctagaatgtcattgccttcagcatcctcaacctcgtcagctctctgagctattcagttgtcaatgccaccaagagaatcatggtcatcacagtgtccctgatcatgctgcccaacccagtcaccagcaccaatgtcctgggcataatgactgccatcctcggggtcttcctctacaagaccaagtaagatgcaaaccagcaagtcaggaagcacctcctcctggcaccacagtggacctgagcagcaaggaacatcacccagagcccactggagaagccccaccaatggcctcctcttcccccagcacggggactatcatggctgcaacaatatcttaacagacacttccagtacagctggcagagctacccaactcttagtttgaa

SEQ ID NO: 1848 - protein, 251 aa, Homo sapiens
MAPNLKAGYNLTICYFAIGDREKMKKAFQKLITVPLEIDEDKYISPSVILSAFLFPVTVSLCHILVLYVGLLLLLHAWRLPPAPPISGPGPSLHSSPGLLLPQHFYPYCVLPLTFGKYFASLSVHVSFWKVPMSYAHTIKATMPIWVVLLSQIIIKKQSNKVYLSLIPIISGVLMATVTKLSFDMWGGRHANVIAFSILNLVSSLSYSVVNATKRIMVITVSLIMLPNPVTSTNVLGIMTAILGVFLYKTK

SEQ ID NO: 1849 - DNA, 1714 bp, Homo sapiens
  source
  (1)..(1714)
  CDS (201)..(1514)
ttcttaccagaaaccaaatctgcctttatcttggacttcccagcctccagaactgtgggaaataatttctgttgcttataagctactcagtttatggtattttgttacagcagtccaaatgaactaagataccaccatgtatacatacacatatacacactatatatgtgtgtatatacacacacatatacacactatatatgtgtgtatatacacacacatatacacactatatatgtgtgtacacacacacacacacactatatatgtgtgtacacacacacacacatacacactatatatgtgtgtacacacacacacacatacacactatatatgtgtgtacacacacacatatacacactatatatgtgtgtacacacacacacatatacacactatatatgtgtgtacacacacacacatatacacactatatatgtgtgtacacacacacacatatacacactatatatgtgtgtacacacacacacatatacacactatatatgtgtgtacacacacacacatatacacactatatatgtgtgtacacacacacacatacacactatatatgtgtgtacacacacacacatacacactatatatgtgtgtatacacacacacatatacacactatatatgtgtgtatacacacacatatacacactatatatgtgtgtatacacacacatatacacactatatatgtgtgtattcacacatatacacactatatatgtgtgtgtatacacacatatacacactatatatgtgtgtatacacacatatacacactatatatgtgtgtatatacacacacatatacacactatatatgtgtatacacacacatatacgcactatatatgtgtgtatacacacacatatacgcactatatatgtgtgtatacacacacatatacgcactatatatgtgtgtatatacacacacatatacgcactatatatgtgtgtgtatatacacacacatatatgcactatatatgtgtgtgtatatacacacacataaatacactatatatgtgtgtgtatatacacacatatatacactatatatgtgtgtgtatacacacatatatacactatgtgtgtgtacacatacatatatacactgtgtgtgtacactcacatatatacactgtgtgtgtacatatatacactatgtgtgtgtacactcacatatatacactgtgtgtgtacatatatacactgtgtgtacactcacatatatacactgtgtgtgtacacacatatacactgtgtgtacacacatatatacactgtgtacacacacatatatacactatgtacacacacatatatacactgtgtacacacacacacgcactgtgtgtgtgtacacgcacacacgcactgtgtgtgtgtacacgcacacacgcactgtgtgtgtgtatatacgtatatacaccatatatgtgcgtatatacgtatatagtgtgtgtacatatgtatatatacacatatagtgtgtgtatatatgactttgatatatatttctatatgtcttagacatatatagatatacacatatatctatatatagacatacacatatacgtatatatagacatatatgatattggtcttttaaaatctggctataaaacttttcccagacatactcctctattcagtgggaaccacctactctatataaaattctagg

SEQ ID NO: 1850 - protein, 437 aa, Homo sapiens
MCVYTHTYTHYICVYTHTHTLYMCVHTHTHTHYICVYTHTHIHTIYVCTHTHIHTIYVCTHTHIYTLYMCVHTHTYTHYICVYTHTHIHTIYVCTHTHIYTLYMCVHTHTYTHYICVYTHTHTHYICVYTHTHTHYICVYTHTHIHTIYVCIHTHIHTIYVCIHTHIHTIYVCIHTYTHYICVCIHTYTHYICVYTHIYTLYMCVYTHTYTHYICVYTHIYALYMCVYTHIYALYMCVYTHIYALYMCVYTHTYTHYICVCIYTHIYALYMCVYIHTHKYTIYVCVYTHIYTLYMCVYTHIYTLCVCTHTYIHCVCTLTYIHCVCTYIHYVCVHSHIYTVCVHIYTVCTLTYIHCVCTHIYTVCTHIYTLCTHTYIHYVHTHIYTVYTHTRTVCVYTHTRTVCVYTHTRTVCVYIRIYTIYVRIYVYSVCTYVYIHI

SEQ ID NO: 1851 - DNA, 1447 bp, Homo sapiens
  source
  (1)..(1447)
  CDS (201)..(1247)
gagtttaaggctgcaatgagctatgatcatgccactacaccgtagcctgggcaacagagtgagacttcatctcgaaaaaattgaaacactaacaaataaataaataaaataaatttaataggaccttcaggtataactataatttgaaccacagtatagattaagtccatgaagatttgttaatcggtgcattttagcaaatgctaaagttaacttacagcctattttgtttagaggcacaaaagccagtcagtgcccttttaatccttttatgtgaatccttttggtatatgcattttgtcatatatttgttatatatatcatttgtcatatacatttttacatacacattttggatttctaattgggttgaattatggacacttgttttaatttatataatacataatctatttattgtatattttataagtatatttatatatataatttattggctcctcttttctccctctcctatatctagggtgtttttgtccttcttctccacccccttttgttcccttttaggcttttggccacctcaagtttttgggttttgtctcaggctgataagaggaagtggtggcggcaggggtatgtgttgggggtgggtgtgggtgtgtgttgggggcaggggtgtgtgtgtgttgagggcaggggtgtgtgtgtgttgggggcaggggtgtgtgtgtgttgggggcaagggtgtgtgtgtgttgagggcaggggtgtgtgtgttagtgcaggggtgtgtgggtgtgggcatgtgttgggtgtgtgtgttgagggttgggggtgtgcgtgtgttggggtgtgtgtgttgggggcaggggtgcatgtgtgttggggtgggtgtgggtgtgtgttgggtgtgtgtgttgagggttggggggtgtgtgtgttgggcaggtgtgtgttggggcgggtgtgtgtgtgtgggggcgtgtgtgtgtgtgttgggggcctgtgggggggcggggtgtgtgttggggatgtgtgtgtgttgggggtgtgtgtgtgttggggtgtgtgtgtgtgtgtgtgttgggggcctgtcgggggtggggtgtgtgttgggggtgtgtgtatgtgttgggggtgtgtgtgtgttggggcgggtgtgtgtgttggagcgggtgggggtgtgggcgcgggtgtgtgtgtgggggggactgccctgtctgcagccagtgtttgcctccccctttcctttttctttttgttctttttttttgtttttttgagacggagtctcgctctgtcacccaggctggcgcgcagtggcgcgatctcggctcactgcaacctctgcctcccgggttcacgccattctcctaactcagtagctgggaccacaggcgcccgccaccacgcccagctaattttttgtatttttagtagagacggggttttcaccgtgttagccaggatggtcttgatctcc

SEQ ID NO: 1852 - protein, 348 aa, Homo sapiens
MLKLTYSLFCLEAQKPVSALLILLCESFWYMHFVIYLLYISFVIYIFTYTFWISNWVELWTLVLIYIIHNLFIVYFISIFIYIIYWLLFSPSPISRVFLSFFSTPFCSLLGFWPPQVFGFCLRLIRGSGGGRGMCWGWVWVCVGGRGVCVLRAGVCVCWGQGCVCVGGKGVCVLRAGVCVLVQGCVGVGMCWVCVLRVGGVRVLGCVCWGQGCMCVGVGVGVCWVCVLRVGGCVCWAGVCWGGCVCVGACVCVLGACGGAGCVLGMCVCWGCVCVGVCVCVCVGGLSGVGCVLGVCVCVGGVCVLGRVCVLERVGVWARVCVWGGLPCLQPVFASPFPFSFCSFFLFF

SEQ ID NO: 1853 - DNA, 1345 bp, Homo sapiens
  source
  (1)..(1345)
  CDS (201)..(1145)
aaggacacttgtcacaatttgtatgtattgatcatttgtaagttgggactaagacttttctgtggtgtgtgtgtgtggttttttttttggaagggagtgtgttgttattctgtgttgctttgctttttcttaaaagatcctcttctatatatttcgtgtgatttaaatgttctttttttttatataggtttgtggtaaatatgccagctctagaacacatgaatcagattttacacatcttgtttgtatttttaccctttctgtgggcacttgggactctgcccccacccgatgcacttctcttatgggcaatggagcaggttttagagttcggccttggaggctcatctatgtcaacccacttacggtatttatttttaaatattgatgttatatgtaatattcttaaagaacatttttcttttcaagtaaatatttttttctttttttttctgtacaggttattagtaatgttcatcatgtctgctggaacagctatagcatcatatttcattccaagcactgttggtgtggttcttttcatgactggatttggtttcttgctgagtctgaacttaagtgatatgggtcacaaaattggaaccaaatctaaggatttacccagtggtccagaaaaacatttttcatggaaggaatgccttttctacatcattatattagtcttggctcttttagaaactagtttgcttcatcactttgctggcttctcacagatttctaaaagcaattcccaggctattgtgggctatggtttgatgatattacttataatactgtggatacttagagaaattcaaagcatatatatcattggaattttccgaaatcccttttatccgaaggatgtgcaaactgtgactgtattctttgagaagcaaactaggctcatgaagattggtattgtcagacggattttgctaactttaggtaggaagataaagtctattaaccttgtgttacaaatcatatcctggaagtattcaaaaatattactcaattcccatatttgtgtggtattataccatatacaagtgtttgttcttttatgttatggttttttgtttattggctttttagttcatcgcttaaatgtgctcataaaaaatgtgtatttgccagaataaaatatggtagaaggagctattttgccttaattaaatttctctctttttgttttgttttagtatcaccttttgccatgatagcatttctttcattggacagttccttacaagggctccactcagtgtctgtctgtattggattcacaagagcctttagaatggtaatcctaatatgtgtttaatagtattttcctattgct

SEQ ID NO: 1854 - protein, 314 aa, Homo sapiens [sequence omitted]

SEQ ID NO: 1855 - DNA, 1180 bp, Homo sapiens
  source
  (1)..(1180)
  CDS (201)..(980)
  modified_base (999)..(1098): a, t, c, g, unknown or other
cttataatcatggtggaaggcgaaggggaagcaaggaccttcttcacatggtggcaggagagaagagtgaaggaagaacttccaaacacttattaaaacatcatgtctcgtgagaactcactcacgatcatgataacagcatgggggaaccaccctcataatccaaccacccccctctctcgacacgtggggagtatagcatgaggattataattcaagatgagagttgggtggggacacagatccaaaccatatcaacacagaagagattgtttttgtttgcctctctccccccctcctgttcttttctttcttggttctcgcccttgctcgctctccccctccgttctgttccctcctcccccctccctcccgccccccctcctcgtttggtgctgtttttgttccttgctcttctccttttttcccgcctgtttgcccggggcgtgttggcgcctcttgctcccccctcccgccccgcggttgtgtttgttttttttctgctgtgtttttttctgcggccccccccgcgtcttccccgcccgcccctgcccctccctctctctctgttcgtcctgctctttccgccgtcctctgtcgtcgtgccgccgtcgcccttccccgcttccgctctctccccccggctctccccgtctgtggtcctctctctcttccctccgccccctcgccgtttccgttcttcgctcctcccccctcttcctttcccttccttccctctctgctcctctcctgtccgtcggtctcccctctttcgttccgtcctttctgcttttcccccgctctcctcgctctctttctcccctgcctctctcttctccttgcgtcctttcgtccctcttttgcctcttcgtttctctcgttttgtcccgtccgtccctcgtccctccgtttcttctccccctctcctcctctccgtccttcttccgtcttcccttcctctccctcttccctgctgctaaccgacagactacaacaaannnnnnnnnnnnnnnnnnnnnnnnnnnnnnnnnnnnnnnnnnnnnnnnnnnnnnnnnnnnnnnnnnnnnnnnnnnnnnnnnnnnnnnnnnnnnnnnnnnnggggggggtcgtaggagtggtggtgggaagacgaaatgagcgagaaaagaccataagaccacaggccgggataagagcaact

SEQ ID NO: 1856 - protein, 259 aa, Homo sapiens
MRIIIQDESWVGTQIQTISTQKRLFLFASLPPSCSFLSWFSPLLALPLRSVPSSPLPPAPPPRLVLFLFLALLLFSRLFARGVLAPLAPPSRPAVVFVFFLLCFFLRPPPRLPRPPLPLPLSLFVLLFPPSSVVVPPSPFPASALSPRLSPSVVLSLFPPPPRRFRSSLLPPLPFPSFPLCSSPVRRSPLFRSVLSAFPPLSSLSFSPASLFSLRPFVPLLPLRFSRFVPSVPRPSVSSPPLLLSVLLPSSLPLPLPCC

SEQ ID NO: 1857 - DNA, 1441 bp, Homo sapiens
  source
  (1)..(1441)
  CDS (201)..(1241)
gtatatatacatgtgtatacatatgtgtatataaatatatacacatatgtatgtgtatatatgtgtgtatataaatatatacacatatgtgtatacacgtgtatataaatatatacacatatgtatgtgtatacacgtgtatataaacatatacacatacgtatgtgtatacacgtgtatataaacatatacacatatgcatgtgtatacatgtgtatataaacatatacacatatgtatgtgtatacatatgtgtgcataaatatatacacatatgtatgtgtatacatatgtgtgcaatatatacacatacgtatgtgtatacatatgtgtgcataaatatatacacatatgtatgtgtatacatatgtgtgtgtaaatatatacacatatatgtatgtgtacacatatgtgtaaatatatacacatatgtatgtgtatacatatatgtgtacataaatatatacacatatgtatgtgtatacatatatgtgtacataaatatatacatatgtgtatacatatatgtatatacgcatatgtgtatatacatatatatgttcataaatatatacacatatgcatgtgtatacatatatgtatacacatatgtatgtgtatacatatatgtgtatatacgcatatgtatgtgtatacatatatgtgtatatatacgcatatgtgtatctatatatatgtatatacgcataggcgtatatacacatatgcgtgtatacatacatatacaaatatacgcatacgtatgtatgtacatacgcatatacgcatacgtatgcacgcatacgtatgtgtgtacatacgcatatacgcatacatatgtacgcatacgtatgtgtgtacatacgcatatacgcatacgcatgtacgcatacgtatgtatgtacatacgcatatacgcatacgtatgtatgtacatacgcatatacgcatacgtatgtatgtacatacgcatatacgcatacgtatgtatgtacatacgcatatacgcatacgtatgtatgtacatacgcatatacgcatacgtatgtacgcatacgtatgtatgtatatatgcatatacgcatacgtatgtacgcatacgtatgtatgtatatacgcatatacgcatgtgtatgtacgcatacgtatgtatatacgtatatacgcatacgtatatacgcatacgtacatacgtacgtatgtatatacacacacgtatatacatatatccacacccgtagatacatatatacacacccgtagatacacatatacacgtatatgtgtagatacacatatacacgtgtatgtgtagatacacatatacacgtgtatgtgtagatacacatatacacgtgtatgtgtagatacacatatacacgtgtatgtgtagatacacatatacacgtgtatatgtgtatctacatatacacgtgtatat

SEQ ID NO: 1858 - protein, 346 aa, Homo sapiens
MCIHVYINIYTYVCVYICVHKYIHICMCIHMCAIYTHTYVYTYVCINIYTYVCVYICVCKYIHIYVCVHICVNIYTYVCVYIYVYINIYTYVCVYIYVYINIYICVYIYVYTHMCIYIYMFINIYTYACVYIYVYTYVCVYIYVYIRICMCIHICVYIRICVSIYMYIRIGVYTHMRVYIHIQIYAYVCMYIRIYAYVCTHTYVCTYAYTHTYVRIRMCVHTHIRIRMYAYVCMYIRIYAYVCMYIRIYAYVCMYIRIYAYVCMYIRIYAYVCMYIRIYAYVCTHTYVCIYAYTHTYVRIRMYVYTHIRMCMYAYVCIYVYTHTYIRIRTYVRMYIHTRIYIYPHP

SEQ ID NO: 1859 - DNA, 1276 bp, Homo sapiens
  source
  (1)..(1276)
  CDS (201)..(1076)
acaggataaagttttactttgctggttacatttgctcctttatgcctgttctacagagactcaccatggtgagcaaaactattcaactatctttaaaataatacctgaaaagtctcttgagggaagcgtgcccctatgcttctgaatagcatctttgtaagaagacaggtttcccttcatgccccacgttgtgtacttggatgctttttatacttttcccactatactgtgcgctgggcttgctgggacattcttcccgttttcccaccatgccatgcgtgctggggcgttcttcacgttttcccatcatgtcttgcatgctgggaggttctttccgtgttctcaccatgccgggcatgctggggcgttcttcaggctttcctgccatactgtgcttgctgggacattataattatgttttcccaccatgccttgcatgctgggggcatttttacgttttcccaccatgccgtgcttgctgggagttcttcagcctttccctgccgtactgtgcatgctgggacgttctttacgttttcccatcatgccgtgggtgctgccacgttcttcctgttttcccaccatcccatgtgtgcagggacgtttttcacgttttcccaccatgccatacgtactggggtattcttcaggctttccctgccatactgtgcatgctgggatgttctttatgttttcccaacattctgtgtgtgctgggatgtttttcacgttttcccagcatgcgttcttcaggctttccctgccgtactgcgtatgctgggacattcttaatgttttcccaccatgccgtgtgtgctggggcgttcttcaggctttccctgccatactgtgcatgctgggacattcttcatgttttcccatcatgctgtgcgtgctgggacattctttacattttcccaccgtgctgtgtgtgctgggaccttcttcatattttcccaccatgccgtgcctgctggggcgtttttcctgcgttcctgccatgctgcatgtgctgtgaagttctttggcttctcctccactactgcttttcccccactcccttgggtgttaattgagacagtgtctctctcttgtgggccctgctctgcctctctggccccctctgaatttcctttatggggttttttttttggtttgttggtttccacacacctatttaatatctgtgggctcaggggtcttcgtttttgacctttttctcctctcagatcagcactggctagcaaagctcatcccctccgtggcttgctccgtt

SEQ ID NO: 1860 - protein, 291 aa, Homo sapiens
MLFILFPLYCALGLLGHSSRFPTMPCVLGRSSRFPIMSCMLGGSFRVLTMPGMLGRSSGFPAILCLLGHYNYVFPPCLACWGHFYVFPPCRACWEFFSLSLPYCACWDVLYVFPSCRGCCHVLPVFPPSHVCRDVFHVFPPCHTYWGILQAFPAILCMLGCSLCFPNILCVLGCFSRFPSMRSSGFPCRTAYAGTFLMFSHHAVCAGAFFRLSLPYCACWDILHVFPSCCACWDILYIFPPCCVCWDLLHIFPPCRACWGVFPAFLPCCMCCEVLWLLLHYCFSPTPLGVN

SEQ ID NO: 1861 - DNA, 1657 bp, Homo sapiens
  source
  (1)..(1657)
  CDS (201)..(1457)
  modified_base (3)..(6): a, t, c, g, unknown or other
  modified_base (9)..(9): a, t, c, g, unknown or other
  modified_base (11)..(11): a, t, c, g, unknown or other
  modified_base (14)..(14): a, t, c, g, unknown or other
  modified_base (16)..(16): a, t, c, g, unknown or other
  modified_base (18)..(18): a, t, c, g, unknown or other
  modified_base (34)..(34): a, t, c, g, unknown or other
  modified_base (37)..(37): a, t, c, g, unknown or other
  modified_base (40)..(40): a, t, c, g, unknown or other
  modified_base (45)..(46): a, t, c, g, unknown or other
  modified_base (51)..(54): a, t, c, g, unknown or other
  modified_base (62)..(63): a, t, c, g, unknown or other
  modified_base (72)..(73): a, t, c, g, unknown or other
  modified_base (76)..(77): a, t, c, g, unknown or other
  modified_base (79)..(79): a, t, c, g, unknown or other
  modified_base (86)..(87): a, t, c, g, unknown or other
  modified_base (92)..(92): a, t, c, g, unknown or other
  modified_base (100)..(100): a, t, c, g, unknown or other
  modified_base (102)..(102): a, t, c, g, unknown or other
  modified_base (115)..(115): a, t, c, g, unknown or other
  modified_base (118)..(118): a, t, c, g, unknown or other
  modified_base (124)..(124): a, t, c, g, unknown or other
  modified_base (129)..(129): a, t, c, g, unknown or other
  modified_base (136)..(137): a, t, c, g, unknown or other
  modified_base (142)..(144): a, t, c, g, unknown or other
  modified_base (150)..(152): a, t, c, g, unknown or other
  modified_base (157)..(157): a, t, c, g, unknown or other
  modified_base (161)..(163): a, t, c, g, unknown or other
  modified_base (168)..(172): a, t, c, g, unknown or other
  modified_base (174)..(174): a, t, c, g, unknown or other
  modified_base (176)..(176): a, t, c, g, unknown or other
  modified_base (179)..(180): a, t, c, g, unknown or other
  modified_base (186)..(186): a, t, c, g, unknown or other
  modified_base (189)..(189): a, t, c, g, unknown or other
  modified_base (193)..(193): a, t, c, g, unknown or other
  modified_base (206)..(206): a, t, c, g, unknown or other
  modified_base (214)..(214): a, t, c, g, unknown or other
  modified_base (217)..(218): a, t, c, g, unknown or other
  modified_base (223)..(226): a, t, c, g, unknown or other
  modified_base (241)..(242): a, t, c, g, unknown or other
  modified_base (255)..(354): a, t, c, g, unknown or other
  modified_base (393)..(393): a, t, c, g, unknown or other
  modified_base (434)..(434): a, t, c, g, unknown or other
  modified_base (473)..(473): a, t, c, g, unknown or other
  modified_base (584)..(584): a, t, c, g, unknown or other
  modified_base (799)..(799): a, t, c, g, unknown or other
  modified_base (1064)..(1064): a, t, c, g, unknown or other
  modified_base (1079)..(1079): a, t, c, g, unknown or other
  modified_base (1129)..(1129): a, t, c, g, unknown or other
  modified_base (1183)..(1183): a, t, c, g, unknown or other
  modified_base (1195)..(1195): a, t, c, g, unknown or other
  modified_base (1208)..(1209): a, t, c, g, unknown or other
  modified_base (1234)..(1234): a, t, c, g, unknown or other
  modified_base (1254)..(1254): a, t, c, g, unknown or other
  modified_base (1258)..(1258): a, t, c, g, unknown or other
  modified_base (1264)..(1264): a, t, c, g, unknown or other
  modified_base (1275)..(1275): a, t, c, g, unknown or other
  modified_base (1284)..(1284): a, t, c, g, unknown or other
  modified_base (1297)..(1297): a, t, c, g, unknown or other
  modified_base (1319)..(1319): a, t, c, g, unknown or other
  modified_base (1332)..(1332): a, t, c, g, unknown or other
  modified_base (1349)..(1349): a, t, c, g, unknown or other
  modified_base (1374)..(1374): a, t, c, g, unknown or other
  modified_base (1405)..(1405): a, t, c, g, unknown or other
  modified_base (1409)..(1409): a, t, c, g, unknown or other
  modified_base (1426)..(1428): a, t, c, g, unknown or other
  modified_base (1432)..(1432): a, t, c, g, unknown or other
  modified_base (1435)..(1435): a, t, c, g, unknown or other
  modified_base (1438)..(1440): a, t, c, g, unknown or other
  modified_base (1447)..(1447): a, t, c, g, unknown or other
  modified_base (1453)..(1453): a, t, c, g, unknown or other
  modified_base (1458)..(1458): a, t, c, g, unknown or other
  modified_base (1480)..(1480): a, t, c, g, unknown or other
  modified_base (1482)..(1483): a, t, c, g, unknown or other
  modified_base (1508)..(1607): a, t, c, g, unknown or other
  modified_base (1618)..(1619): a, t, c, g, unknown or other
  modified_base (1624)..(1624): a, t, c, g, unknown or other
  modified_base (1628)..(1628): a, t, c, g, unknown or other
tcnnnnttntntcncntncccttttctttccctnttnctntcctnnctttnnnnttcccttnnttcccttcnnccnntncttcttnnttttntttccccntncctcgggcttctnccntttctnccccnttttttnntctcnnnttctcnnnccccnttcnnnctctnnnnntncncgnnttttcnaanggtntcaagcaatgggnctcagctnttnnccccnnnnccccctccccccgannctcttcttttttnnnnnnnnnnnnnnnnnnnnnnnnnnnnnnnnnnnnnnnnnnnnnnnnnnnnnnnnnnnnnnnnnnnnnnnnnnnnnnnnnnnnnnnnnnnnnnnnnnnngggttttgctggcttttgcctgcttcttccgtttttccncttttttgccgccttctcccggggtcctttgtcttcccggntggggtcccccttcgtggttcgcgctgtgggcgggttcncccctttgtgggtgtccggcggtttttttcctccttggtgtgtcccctttgccgtttttgctcccccttgtttttccttgcctttgcctttctgttgtttgggggttttcngggggcccctttcttttccgggggttttcggtgtttgtcgcgtgttttcccttttgccgccttccgggttccggtttggcgttccccgctttgtctttttgcgggtttcccgcggtgcttgcccttccccgttcggggtgcgtctctccgggtgttggctgggtttccgggtctggcttttccttttccggcctccggtgccgtttgttctgggngtgccgcccttttcggtgtgcgttccggctccgttgcgtttggtggtcgttccgcttccggcgcccttcgcctttctggctgccccttggttgggccgggcgttcggtgcgggcctcttcggttttccgcctgctggcgttcgggggctgtgctgcccggcgcttttgttgggtttcgcctgggttttccctgtctcgccgttgttttccgtcggcctgtgccccgcttgcttgcctgctggtcctgcttctccttgctgtgggntccgctcttctgccnttcgcctggttcttttctcgttctctttgttcggttcttttttgttggcnccgtgcctctctctgtccccccggctggttgtgccgttgtgtgttctcggctcnctgccgcctcgncctcctgtgcccnngcgttcctcccccctctgcctcccntgttggtgggtttcctgttntgcncttccncgccttgctcntttctcttngtttttgtagcgncgggctctccctcggttgctcnggctggtcttgcnctcctgggctccggtgntcctcccgcctgggccttccttgtngctggttctccttttgctctccccctccccngctntttttcctttttttggnnngttnctnagnnnttttgcntatgcnatagncggtacgaaaggggtcaagcantnnacaaccgcccgctgcccgcctttcnnnnnnnnnnnnnnnnnnnnnnnnnnnnnnnnnnnnnnnnnnnnnnnnnnnnnnnnnnnnnnnnnnnnnnnnnnnnnnnnnnnnnnnnnnnnnnnnnnnncttttttttcnnttttncttnccctttttccttctttttcccccccttcc

SEQ ID NO: 1862 - protein, 418 aa, Homo sapiens
  MOD_RES (5)..(6): Variable amino acid
  MOD_RES (8)..(9): Variable amino acid
  MOD_RES (14)..(14): Variable amino acid
  MOD_RES (19)..(52): Variable amino acid
  MOD_RES (65)..(65): Variable amino acid
  MOD_RES (200)..(200): Variable amino acid
  MOD_RES (310)..(310): Variable amino acid
  MOD_RES (328)..(328): Variable amino acid
  MOD_RES (332)..(332): Variable amino acid
  MOD_RES (337)..(337): Variable amino acid
  MOD_RES (345)..(345): Variable amino acid
  MOD_RES (352)..(353): Variable amino acid
  MOD_RES (355)..(355): Variable amino acid
  MOD_RES (359)..(359): Variable amino acid
  MOD_RES (362)..(362): Variable amino acid
  MOD_RES (366)..(366): Variable amino acid
  MOD_RES (378)..(378): Variable amino acid
  MOD_RES (383)..(383): Variable amino acid
  MOD_RES (392)..(392): Variable amino acid
  MOD_RES (402)..(402): Variable amino acid
  MOD_RES (409)..(414): Variable amino acid
  MOD_RES (416)..(416): Variable amino acid
  MOD_RES (418)..(418): Variable amino acid
MGLSXXPXXPLPPXLFFFXXXXXXXXXXXXXXXXXXXXXXXXXXXXXXXXXXVLLAFACFFRFSXFLPPSPGVLCLPGWGPPSWFALWAGSPLCGCPAVFFLLGVSPLPFLLPLVFPCLCLSVVWGFSGGPFLFRGFSVFVACFPFCRLPGSGLAFPALSFCGFPAVLALPRSGCVSPGVGWVSGSGFSFSGLRCRLFWXCRPFRCAFRLRCVWWSFRFRRPSPFWLPLGWAGRSVRASSVFRLLAFGGCAARRFCWVSPGFSLSRRCFPSACAPLACLLVLLLLAVGSALLPFAWFFSRSLCSVLFCWXRASLCPPGWLCRCVFSAXCRLXLLCPXVPPPSASXVGGFPVXXFXALLXSLXFCSXGLSLGCSGWSCXPGLRXSSRLGLPCXWFSFCSPPPXLFFLFLXXXXXXLXMX

SEQ ID NO: 1863 - DNA, 1285 bp, Homo sapiens
  source
  (1)..(1285)
  CDS (201)..(1085)
  modified_base (866)..(965): a, t, c, g, unknown or other
agcaggagctaagggcttcttgttatcattgtcatttttaccatgatatagacaagcaagccaaggtcagagaggttcgggggcctgcccaggactacacaggtggcagaggagccggaatgccagtttctaaaacagagaggcctcaactacatcacaatttcatcatctaacaaatacgttttgtgctgcctcagggcatgcccctgtgcacaatcctgcccccaccccaacagctcacatttatgggcacttgtcacctgccaagttattttctgatttcacagatggggaaactgaggctcagggatgttaaggggcttctcccagtgcacacagcagggaacatgtggcctgacacctcgaccttgatgtgcctaacgctgttaaatttcccggggtataatctcagagttaggtttattcatggtcatatcttcattacttttattttggttcttccttgtgttcctcgtttcgtcgtcgctcttctttcctcttgtcgttgtgtttcgtcttctttcttttgtttgttccccttctctctgttcttctcgtcttcttcttttgttcttcctctttgttcctttctcgtccttcttcgtcgtctttgtttctccctttcctttgtttcttctctctcttgtgtttgttattatcctcttgtgcgtctgtgcttttttctcctgtggtggtgttttcctgtcttttccgcttctgtgtgtttcgttcgtgttttgtcctcttctcctcttctttgtcttccgtttgctcttgtcttctttcgtttgttctgttctcttctcttcgccttctcttgtcattgtcctgcctcttgtctgctgatctctttcgtttggcgtttnnnnnnnnnnnnnnnnnnnnnnnnnnnnnnnnnnnnnnnnnnnnnnnnnnnnnnnnnnnnnnnnnnnnnnnnnnnnnnnnnnnnnnnnnnnnnnnnnnnncttatccggggtaagagacactgtctctgccccatcccctcccctcggtaccatcgctttaacctgacttgcaactacctgcacctgtatctattggcctgccggttttctatttgctgaggccttcatgggcaggtgagaaatgccagggaattagaactccattgcacaacccagcagcactcaagcagtgatggacaggagtgaatccttcccttaactgtcttagcccctccctggcctccacactcccttattcatgtgagatcacctcctaaataaacaacttgcactcaaatctccttctgggggaaccttaa

SEQ ID NO: 1864 - protein, 294 aa, Homo sapiens
  MOD_RES (222)..(255): Variable amino acid
MPLCTILPPPQQLTFMGTCHLPSYFLISQMGKLRLRDVKGLLPVHTAGNMWPDTSTLMCLTLLNFPGYNLRVRFIHGHIFITFILVLPCVPRFVVALLSSCRCVSSSFFCLFPFSLFFSSSSFVLPLCSFLVLLRRLCFSLSFVSSLSCVCYYPLVRLCFFLLWWCFPVFSASVCFVRVLSSSPLLCLPFALVFFRLFCSLLFAFSCHCPASCLLISFVWRXXXXXXXXXXXXXXXXXXXXXXXXXXXXXXXXXXLIRGKRHCLCPIPSPRYHRFNLTCNYLHLYLLACRFSIC

SEQ ID NO: 1865 - DNA, 1594 bp, Homo sapiens
  source
  (1)..(1594)
  CDS (201)..(1394)
  modified_base (800)..(800): a, t, c, g, unknown or other
  modified_base (1162)..(1162): a, t, c, g, unknown or other
  modified_base (1221)..(1221): a, t, c, g, unknown or other
  modified_base (1225)..(1227): a, t, c, g, unknown or other
  modified_base (1231)..(1231): a, t, c, g, unknown or other
  modified_base (1243)..(1244): a, t, c, g, unknown or other
  modified_base (1256)..(1256): a, t, c, g, unknown or other
  modified_base (1258)..(1258): a, t, c, g, unknown or other
  modified_base (1263)..(1263): a, t, c, g, unknown or other
  modified_base (1265)..(1265): a, t, c, g, unknown or other
  modified_base (1268)..(1269): a, t, c, g, unknown or other
  modified_base (1271)..(1271): a, t, c, g, unknown or other
  modified_base (1292)..(1391): a, t, c, g, unknown or other
tacatacatcatcgatgactacgttcggttacaacgtttcacatcaatgttcacaattctagtcattatcgtccgtcgtacatgttttcttcacattctcgtcattgtcatgatgatatcattacatcttcatcgtatactcgtatcgtcattacatcatatgtcatatcgtcacatcatactgtctactgtttcgtcatatgtcttttctactcgcatctatttcgatctatcatcatcatatctcattgtatatctcaacatctctcgtgtatatcacatcattctctcatcactatatctgtcatctgtctcatatctcccatcatgtctctcatgactcgcgttcatcgcttatcatacgctcgtacatgtctcatattcatatctcatattcgtttatttatgtgactgtgtatcccatctcacatgtatgtacgtatctatgtctgtacatctatattcgtactatatacatgtattatctattcgcttacattatgtatattctgtatattctacatctaattaccctatgttgtcctattctctctctgctatactgtgtattgtattactgtttcttcattttttcttatttttttctatttattctctctttctttttctgtgctactcttctgtgctttcccttcctttcctcttcctctctttctcttcttcctcttttcctttcgtgctcttccttcttcttgtctctgttgtttccttccttcttttctctggtgtttcttgttctttctctttctgctcttccctccgttgttctttgtcttccntgttgtgtgttcgctctgttgttcgtcttccgttttcttctttcgcttcttcctgttttcgtcttctttgcttttcttctctttctcctcttctttcttctctgttcctccctttttcttttctttctccctcttcttttttcttcttccttggttcttctgtccttctcgctttttctcttctctcttctttttctttccttttcttcttcttttgctcttctttcctgttttctcctttttcttttttctcttttttttgtttccttcgtttctttcgtttctctcctctccttgtttccttcttcttctctttcctttttgttctttttttttgcggtgttctttggtgtgttcttgantggcctcttttatgccctccccctccttcctcgtgcctctcttgcgtcttccgcttatntgtnnngcgncggccagtgccnngcttgcatgccncnggtcntntanngntttaaaacgacggcagtgatnnnnnnnnnnnnnnnnnnnnnnnnnnnnnnnnnnnnnnnnnnnnnnnnnnnnnnnnnnnnnnnnnnnnnnnnnnnnnnnnnnnnnnnnnnnnnnnnnnnntgacttcttcctcctcatcccatttaccctccttcttctttccatatcccacttataccacccttcttatcatatcttatactctaaacctctttatctttcactataatcaccaccttcttatcaacctaccctacacatcctaatatacaacttctcccccacctactttatcatcctcattcctccatctttatcccatc

SEQ ID NO: 1866 - protein, 397 aa, Homo sapiens
  MOD_RES (321)..(321): Variable amino acid
  MOD_RES (341)..(344): Variable amino acid
  MOD_RES (348)..(348): Variable amino acid
  MOD_RES (353)..(353): Variable amino acid
  MOD_RES (355)..(357): Variable amino acid
  MOD_RES (364)..(397): Variable amino acid
MSFLLASISIYHHHISLYISTSLVYITSFSHHYICHLSHISHHVSHDSRSSLIIRSYMSHIHISYSFIYVTVYPISHVCTYLCLYIYIRTIYMYYLFAYIMYILYILHLITLCCPILSLLYCVLYYCFFIFSYFFLFILSFFFCATLLCFPFLSSSSLSLLPLFLSCSSFFLSLLFPSFFSLVFLVLSLSALPSVVLCLPCCVFALLFVFRFLLSLLPVFVFFAFLLFLLFFLLCSSLFLFFLPLLFSSSLVLLSFSLFLFSLLFLSFSSSFALLSCFLLFLFSLFFVSFVSFVSLLSLFPSSSLSFLFFFFAVFFGVFLXGLFYALPLLPRASLASSAYXXXXGQCXACMPXVXXXFKTTAVXXXXXXXXXXXXXXXXXXXXXXXXXXXXXXXXXX

SEQ ID NO: 1867 - DNA, 1561 bp, Homo sapiens
  source
  (1)..(1561)
  CDS (201)..(1361)
  modified_base (942)..(943): a, t, c, g, unknown or other
  modified_base (1062)..(1062): a, t, c, g, unknown or other
  modified_base (1071)..(1071): a, t, c, g, unknown or other
  modified_base (1076)..(1076): a, t, c, g, unknown or other
  modified_base (1078)..(1078): a, t, c, g, unknown or other
  modified_base (1080)..(1081): a, t, c, g, unknown or other
  modified_base (1083)..(1083): a, t, c, g, unknown or other
  modified_base (1090)..(1090): a, t, c, g, unknown or other
  modified_base (1112)..(1112): a, t, c, g, unknown or other
  modified_base (1135)..(1137): a, t, c, g, unknown or other
  modified_base (1169)..(1178): a, t, c, g, unknown or other
  modified_base (1180)..(1180): a, t, c, g, unknown or other
  modified_base (1184)..(1184): a, t, c, g, unknown or other
  modified_base (1186)..(1187): a, t, c, g, unknown or other
  modified_base (1190)..(1190): a, t, c, g, unknown or other
  modified_base (1193)..(1194): a, t, c, g, unknown or other
  modified_base (1199)..(1199): a, t, c, g, unknown or other
  modified_base (1252)..(1351): a, t, c, g, unknown or other
gtgtttcttctctccccgcttttctgcgctcgtttcggttccctcttcgggtttcctcttcccctcctctctctgtttggcctctgtcttctccccctgccccgtgggttgtttctttctgcccccgggcgttttccctttcgcgcccctcctggtctcctccctccctttctccagtcccccgtttgtgcctcttctgtatgtgcgctctctcggggctctttgcccttgcccccttctctattccgtgtttctgcttttttttcctcccgtctgccttgtgtttgctctcctttgcctcttcccttgtcttttggcccccctctgcttccgggttcgcccccttctggactcttttgggggtctggccggccggtcctccatccttgttcccttggccctttgtgttttcccttgcccgttctcctggcgtctgtcccccggccgtttgttttgtgcgtttcccgccggtcctgtcggtttcctgcccttttccgtcctcctgccgctttttgcggctccttggccgttgtgcgtttcccccccggtgtttgggttccctccagttgttcacgttcccctcctggggccctggccctctgggtaaccttgggtcgcctgctttcccgggtggcctgtgcttgtgcgcttgccctttctctccggtggcttgggtccttgcatcctttgcttgggcccctggggccttgtgttttgtggtgcctcctttcactggccttgacctggtgttcaggtttcggctttgtgctctatgccgtttctttccgcccttgtttgtccctttccttccgttgctggccggccgtttttgttccgtgcctgttctttttcgcccctatgccgcggtctcccatagtgtcctttggtgtgcccgcgccaggctttgtggtgtggcgtgggtgcgttctttttggtgtctgnngtctcggttctgtcgtttgtcctggcgccgcctcctgggtctctttgtttcttggttttctcctctgttctttggtttgtcttgcttgtttcttgggttcggtgtgggcccccccctcntgtgtcttncgttntntnngntcgccgntttttacggttgttctcaaaantttggctctcctccttctctctnnntccttttttctatattcctgtctccgaggatnnnnnnnnnncngaangnnagnaanntttgntgtttctcctttttcctccctgcgctctcactccttgcccttcctctccttcnnnnnnnnnnnnnnnnnnnnnnnnnnnnnnnnnnnnnnnnnnnnnnnnnnnnnnnnnnnnnnnnnnnnnnnnnnnnnnnnnnnnnnnnnnnnnnnnnnnnatttgttccactttgggcattcttttatgtctgaatagaattatctttactatagtaaagagggacacagtacttcttacagagtgcatatagtgcacaggagtggcagctcacacttgtaatcccagcattttggaagttgagtcaggtggatagttcaagtcatgagtagacgtccagcatggcaaacatggtaaatccatgcctcta

SEQ ID NO: 1868 - protein, 387 aa, Homo sapiens
  MOD_RES (248)..(248): Variable amino acid
  MOD_RES (288)..(288): Variable amino acid
  MOD_RES (291)..(295): Variable amino acid
  MOD_RES (297)..(297): Variable amino acid
  MOD_RES (304)..(304): Variable amino acid
  MOD_RES (312)..(313): Variable amino acid
  MOD_RES (323)..(333): Variable amino acid
  MOD_RES (351)..(384): Variable amino acid
MCALSGLFALAPFSIPCFCFFFLPSALCLLSFASSLVFWPPSASGFAPFWTLLGVWPAGPPSLFPWPFVFSLARSPGVCPPAVCFVRFPPVLSVSCPFPSSCRFLRLLGRCAFPPRCLGSLQLFTFPSWGPGPLGNLGSPAFPGGLCLCACPFSPVAWVLASFAWAPGALCFVVPPFTGLDLVFRFRLCALCRFFPPLFVPFLPLLAGRFCSVPVLFRPYAAVSHSVLWCARARLCGVAWVRSFWCLXSRFCRLSWRRLLGLFVSWFSPLFFGLSCLFLGFGVGPPLXCLXXXXXAXFYGCSQXFGSPPSLXXLFSIFLSPRXXXXXXXXXXXCFSFFLPALSLLALPLLXXXXXXXXXXXXXXXXXXXXXXXXXXXXXXXXXXFVP

SEQ ID NO: 1869 - DNA, 1360 bp, Homo sapiens
  source
  (1)..(1360)
  CDS (201)..(1160)
  modified_base (973)..(1072): a, t, c, g, unknown or other
ctcactgtctggcagctaatgtgaaaacaggggaaatatctctgtgaaaaatgattactttgtttgtatttaaaaaagagtaatccaggtgttcaggagaaacaatgttttttctggttttgtgatgtgaggaaaatgtcctctaccaagccttataaaaagaacgcttgtgtgaaagagtgaagattcaagagtgaagaatgtttgtttcttttttttttttttattatactttaagttttagggtacatgtgcacattgtgcaggttagttacatatgtatacatgtgccatgctggtgcgctacacccactaactcgtcatctagcattaggtatatcttccaatgctatccctccccccgccccccccaccacagtccccagagtgtgatattccccttcctgtgtccatgtgatctcattgttcaattcccacctatgagtgagaatatgccgtgtttggttttttgttcttgcgatagtttactgagaatgatgatttccaatttcatccatgtcccctacaaaggacatgaagtcatcatcttttatggctgcatagtattccatgatgtatatgtgcacattttcttaatccagtctatcattgctggacatttgggttggttccaagtctttgctattgtgcataatgtcgaattaacatacctgtgcatgtgtctttatagcatcatgctttacagctcttttggtagacatccacttatgcgatcgctggggcctatggtatttctagttctaccttcccaggcacgtcacactttccctcaccatggtcgcaccagtttctatttttactatcttgttctcgcgctctttgtgccccatttctttctactacttgtcgccttcctttttttttatcgcttgctctctatctggtttctgctgttttctcttagcgtgttccatttgtcttctcctgttccttttgtcgtgttctcctcttnnnnnnnnnnnnnnnnnnnnnnnnnnnnnnnnnnnnnnnnnnnnnnnnnnnnnnnnnnnnnnnnnnnnnnnnnnnnnnnnnnnnnnnnnnnnnnnnnnnncgcgtgtctggttataaataaaaaaggcgctgctcaatcccccatcaaaaggatgagggggattccccccgcgtcccccaaaaattaatccctctccggagattctcacacccctttccggcattaatctagaattttagaagattgggatttttcctggaaaaaaactcttctccagattaaaccagagaagagtgaatttctgaaaagcccaataaaagggctggaattggtgcacaaaattcgaatgtttccccacccaaaagagttccaggccacagtggattt

SEQ ID NO: 1870 - protein, 319 aa, Homo sapiens
  MOD_RES (258)..(291): Variable amino acid
MFVSFFFFYYTLSFRVHVHIVQVSYICIHVPCWCATPTNSSSSIRYIFQCYPSPRPPHHSPQSVIFPFLCPCDLIVQFPPMSENMPCLVFCSCDSLLRMMISNFIHVPYKGHEVIIFYGCIVFHDVYVHIFLIQSIIAGHLGWFQVFAIVHNVELTYLCMCLYSIMLYSSFGRHPLMRSLGPMVFLVLPSQARHTFPHHGRTSFYFYYLVLALFVPHFFLLLVAFLFFYRLLSIWFLLFSLSVFHLSSPVPFVVFSSXXXXXXXXXXXXXXXXXXXXXXXXXXXXXXXXXXACLVINKKGAAQSPIKRMRGIPPASPKN

SEQ ID NO: 1871 - DNA, 1639 bp, Homo sapiens
  source
  (1)..(1639)
  CDS (201)..(1439)
  modified_base (226)..(325): a, t, c, g, unknown or other
ttaattgagcagacaagtttgttttattttggagcctttttggctctggcttttaaacattgtcctggttggctcatttaatttttttttttttttttgagaccgagtcactcttgtcacccaggctggagtgcagtggcgcgatctcggctcactgcaagctccacctcctgggggatcctctagagtcacctaacagcatgcagctgcctgccgtttctttttnnnnnnnnnnnnnnnnnnnnnnnnnnnnnnnnnnnnnnnnnnnnnnnnnnnnnnnnnnnnnnnnnnnnnnnnnnnnnnnnnnnnnnnnnnnnnnnnnnnngttatctggtcgcagcgtgtctgcgtactgctgttgttgtattgtctctcgtcttttgctcgtgtcctctacgtcctctgctctctgttgctgcttcttgcgtgtcctctttctccttcggtctctgttgtttgttgactgtttattctctgctttcttcattcgtttttgtttctgtgttggcttctcgccctgtcgtctgctctcgcgcttgttgcgtcttttgtcttgtgggctgtgtctttttgttgtctcgcttcgttgcgtgttctctttctgtatctttcctcgtccgtgctttgttgctgctcgttctctgttcttctccgttcgttgttgtgtttctctcttcgtctttattttgttgttgtttgttcttgggctcgtttcctctcctgcgctgtcctgctctgtgctatctgtcgttgttgttcgtccttatttgttgttttcgtgtgtcttctcttacgttgcttcctttcccctcttcctgtttgttttggtcttggtctggtgctcttctctcttgctatgctcttcgctcttctctctcgtacttctgttcgctttgcgtctcctcttttccttctgtctgttcttgttcttgttcttcttgtattttctttatcgtcttcattgtcttgttgtttgtgtttcgcgttgggtggtgtggccatgttttgtttctgcttgggtgtgtgttctttgtgtttcttgctgtatgtattggttgtctgtggtgttctgtctttgtctgttgttttggtcttgttattattgtttgtttggtgttttcctctgtggtgatgttttgtgttgtgtcgttgtttgtttgtctgtgtgggtgtcggtggttgtgtggtgtctgttttgtatttgttttcttgttgtcttttttgttttctgtttgttgttttttccttttttgtattgtttgttgttgtttttttgttgtgtcgtgttttcttttgttgtttctgtgtatgtgtctttctttctttctcgttgtcgtctcttctattgtgtttttgtcttctattcgcattgtttttttactttctgtcttgtttgcgtttgtcgttcatgtttggtcatttggttgtggttgccctagtcgtctgtgtgtgttctttgtgctctttgttcttgctgttgttgctttctgtgcacttcgtcttgtattgtatgtgttgtgtgatctttgccagtgtctttcccgtgctcggtctcgtctgtttgtgatcgtatatttttttgtttttgttatttttgatttgtgatgtctggtgttgtttcttctttgtctttttttct

SEQ ID NO: 1872 - protein, 412 aa, Homo sapiens
  MOD_RES (9)..(42): Variable amino acid
MQLPAVSFXXXXXXXXXXXXXXXXXXXXXXXXXXXXXXXXXXLSGRSVSAYCCCCIVSRLLLVSSTSSALCCCFLRVLFLLRSLLFVDCLFSAFFIRFCFCVGFSPCRLLSRLLRLLSCGLCLFVVSLRCVFSFCIFPRPCFVAARSLFFSVRCCVSLFVFILLLFVLGLVSSPALSCSVLSVVVVRPYLLFSCVFSYVASFPLFLFVLVLVWCSSLLLCSSLFSLVLLFALRLLFSFCLFLFLFFLYFLYRLHCLVVCVSRWVVWPCFVSAWVCVLCVSCCMYWLSVVFCLCLLFWSCYYCLFGVFLCGDVLCCVVVCLSVWVSVVVWCLFCICFLVVFFVFCLLFFPFLYCLLLFFCCVVFSFVVSVYVSFFLSRCRLFYCVFVFYSHCFFTFCLVCVCRSCLVIWLWLP

SEQ ID NO: 1873 - DNA, 1279 bp, Homo sapiens
  source
  (1)..(1279)
  CDS (201)..(1079)
  modified_base (247)..(247): a, t, c, g, unknown or other
  modified_base (251)..(251): a, t, c, g, unknown or other
  modified_base (256)..(258): a, t, c, g, unknown or other
  modified_base (260)..(261): a, t, c, g, unknown or other
  modified_base (264)..(264): a, t, c, g, unknown or other
  modified_base (266)..(266): a, t, c, g, unknown or other
  modified_base (279)..(279): a, t, c, g, unknown or other
  modified_base (290)..(290): a, t, c, g, unknown or other
  modified_base (319)..(418): a, t, c, g, unknown or other
  modified_base (564)..(564): a, t, c, g, unknown or other
cgtccgggagggaggtggggggcagccctcacgcagccgccaccccgtccgggaggtgggcacctctgcccggccgccccatctgggaggtgaggagcccctctgcccgggccgccaccccgtctgggaggtgtacccaacagctcattgagaatgggccatgatgacgatggcggttttgtcaaatagaaaagggagaaatgtggggaaaagagagagagatcagattgttactgtgcgtgtgtanaaanaagtnnncnngtntntacgaaggcatcntcttcaaggtnctccaatcttttattattcttctgcgctnnnnnnnnnnnnnnnnnnnnnnnnnnnnnnnnnnnnnnnnnnnnnnnnnnnnnnnnnnnnnnnnnnnnnnnnnnnnnnnnnnnnnnnnnnnnnnnnnnnnggcgggtctctcgtctcccctcttcgcgtcttctcccgtctttcctctctcctcgtttcctctctcctcgtggcgtcgtcttctcgtgtggctctctccctcgctcctcctcctgtcctcgttccgtcttgtcgtgtcgggcctcnttcctgtttcgtgtctcgtcctcgtcgcgcgtgtgtcttcctgtgctctcgttccgtcttcttgtctctccgctctcgtctctctttgccgtgcctctccgccgttccgtccgtcttttgtccttctgttgtctccgtctttttgttctgctcttccgctcttgctgcttcttggtttttctgccttcctttctctctttctcggtgcttctctttgtctcttctcttcctggtggggcttctgccctcgttgtgtcggttgtgtctctcttcttctgtcggccttgtgttgtttcgcctttcgcccttcttctgtgcttgctttttctcgcttttgctccttgtgctctccttcccttttccgtccttcttcttgttgtccttccgcctcctccctttctgtttcctgggctctttcttttggccttctccctccccctgcttttgttctcccgcctccggtccggcctggtggctctcccctttttcctccgccctttgggagtctgaggtaggcagatcacctgagctcaggagttcgagaccagcctggccaatgtggtgaaaccctgtttctactaaaaatacaaaaattacctgggtgtggtagtgggtgcctgtaatcccagccacttgggaggctgaggcaggagaattgcttgaacctgggaggcggaggttgcagtgagctgagactgcaccattgcactccagc

SEQ ID NO: 1874 - protein, 292 aa, Homo sapiens
  MOD_RES (16)..(17): Variable amino acid
  MOD_RES (19)..(22): Variable amino acid
  MOD_RES (27)..(27): Variable amino acid
  MOD_RES (40)..(73): Variable amino acid
  MOD_RES (122)..(122): Variable amino acid
MWGKEREIRLLLCVCXXKXXXXYEGIXFKVLQSFIILLRXXXXXXXXXXXXXXXXXXXXXXXXXXXXXXXXXXAGLSSPLFASSPVFPLSSFPLSSWRRLLVWLSPSLLLLSSFRLVVSGLXPVSCLVLVARVSSCALVPSSCLSALVSLCRASPPFRPSFVLLLSPSFCSALPLLLLLGFSAFLSLFLGASLCLFSSWWGFCPRCVGCVSLLLSALCCFAFRPSSVLAFSRFCSLCSPSLFRPSSCCPSASSLSVSWALSFGLLPPPAFVLPPPVRPGGSPLFPPPFGSLR

SEQ ID NO: 1875 - DNA, 18746 bp, Homo sapiens
  source
  (1)..(18746)
  CDS (201)..(453)
  CDS (808)..(955)
  CDS (1224)..(1856)
  CDS (2001)..(2606)
  CDS (3013)..(3151)
  CDS (5893)..(6401)
  CDS (6523)..(6694)
  CDS (6814)..(7090)
  CDS (7799)..(7899)
  CDS (7947)..(8280)
  CDS (12144)..(12482)
  CDS (13251)..(13544)
  CDS (14041)..(14329)
  CDS (18159)..(18546)
  modified_base (1622)..(1721): a, t, c, g, unknown or other
  modified_base (7104)..(7203): a, t, c, g, unknown or other
  modified_base (8304)..(8403): a, t, c, g, unknown or other
  modified_base (14351)..(14450): a, t, c, g, unknown or other
  modified_base (18180)..(18180): a, t, c, g, unknown or other
  modified_base (18183)..(18183): a, t, c, g, unknown or other
  modified_base (18196)..(18196): a, t, c, g, unknown or other
  modified_base (18239)..(18239): a, t, c, g, unknown or other
  modified_base (18250)..(18349): a, t, c, g, unknown or other
tccttcagggtgacgcgcactgaataactcgcttgtcaccgggacacgcgcctccaggtctggggtgccttcccaggctgaggcagcactgacggggctcagtggagggcccccagtcctactgcggctaccccgcctctccgcggtccggctcggcttgaccccagtgcctgttccaggtgtgccccatctgctcggcaatgccctggggggaccccagctacaagagcgccaacttcctgcagcacctgcttcaccgacacaagttctcctacgacacctttgtggtaggcatcccgccagcaccgtcctcccccacgccctcctcatccaccctcctcctgctcgggcccctcgccagcctcagggtccgcagggttcagaggaagccagaaacagaagcctcgtttcaggtggccacattcccccaggttctgtgggggctgcctgcaggtggggagtgatggcagctgagtttgagtggccactagagggtgcccaggcctctcggggacatggaccgcacagggcaggtccctgcctgcccaccccacagaacccctcgagggtgagccaggcttccttctggaagctttctagagagcgcgggaaggactttcatcaacatcgaacactccagccctgtctccttttcccacccgccgcgggtcaggcacacacctggcccccgggcctgcagaccctcgcacaaactcctcactcctggtgcggcccctccctgcgccgccctgttcattcctggccctggctaacagtcctggcgatggctgtcactccctctgccagtcgtccgggacccacgctccgcctgcctcaggatggaaattgttagaggtcagggagccctggccggcctgctcacctcgcaaaccccgggcttagagtccgacctgaaccagcagccatccattccgagtgcccccgtacccagcgggtgatggacacaccttcaccttctcaccccccagaggaccgtgcaggccccgagcctgtggggacagtggagctgggtccttcctgtgtcctgctggagggaggcaggaagggtggacacgcctgtgtgggtgatgggcagaggggacctctccttcctgtctccctcgagcccggtgcatctctccttcctgtctccaggactacagtattgacgaggaggccgccttccaggctgctctggccctgtctctctctgagaactgaagggaagcgcagccacccgcctgcgtctggggtcagggatgtccccgctcctgtgtcgcacctggcacctgctcgggagtgcacctcaccggactgagctcacaggaggagcctgcacccgcgcagaaggggagccggggccgagcctccgggcctgaatacgggccagccgccgaggccgccagagcagggccgcctggtcccaccggcgtcgctgggttcttcggtgcttctggccgagcaggcggcctacttgggcagggctggacgctgagacctggagctgccaccgtctcttcaagccatgataccccctcgtgggaagaagggaccgacgcgcgagtcgcggctgcgcagtcgagcccgggaggaacccaggctgctgccctggccagcccgannnnnnnnnnnnnnnnnnnnnnnnnnnnnnnnnnnnnnnnnnnnnnnnnnnnnnnnnnnnnnnnnnnnnnnnnnnnnnnnnnnnnnnnnnnnnnnnnnnnccctcagcccccagggaggcagctgcctgccccacttttctccagagccatcatggccctgctcccaccccagccacggctgctcaggggcgctccgcatgctctggtctccatccacctgcagcccccactggggtgaggtggagcttcttgcctctccttgtgtctatttcctctgcttccacaactgaacggtgacaggtatttgctggatgagggagcacaccccaggtggtttcctctgagcctgggaggccttttcctgcctgtgggccccaggcccatcctgctgccacccccaggaggatgcccggctccttgtgacaagagtgaccctcgggaggcgtggggagtggggctggccggcctgcctgatggggtcctgagtccatggcgggtttgcatctcaggcctctgggctctggccgggctgggggctattgtccggctgagcggcctgggctgcggcccctccccgtccccaggaccagcctcacccactcgctctgccgcaggtcacacaggccgcctcctgcgggcattgctgggcctcagcctgctcttcctggtggcccatctcgccctccagatctgcctgcatactgtgccccgcctggaccagctcctgggacccagctgtgagtcgctgagggggcggggtagggatagccatcctgggggtcagggagagggccctgcagtgaccccgagtctcctgggggggttgactcagcctgatttatgtctggcctggatggtccaggtgaaacgctccagggatgaccaggccacggtgctggctgggcagagcctgacctgggttcccccgtctttctctgcaggcagccgctgggagaccctctcgcgacacataggggtcacaaggtaagaccattcctcccacccccaaccagcaagcctcccttggggatttcaggccccaggaagtggggggacccaggagggacagagggggacctggagactcatccacactcccacccacacctggagacccatccacgctcccacccacacctggagacccatccacactctcacccgcacctggagacccatccacactcccacccgcacctggagacccatccacactcccacccgcacctgcagacccatccacactctcacccgcacctggagacccatccacactcccacccgcacctggagacccatccacactcccacccgcacctggagacccatccacactcacacccacacctgtcctcttggtctgaccgcggctgctccctgctctccgcaggctggacctgaaggacatccccaacgccatccggctggtggcccctgacctgggcatcttggtggtctcctctgtctgcctcggcatctgcgggcgccttgcaaggaacacccggcagagcccacatctacgggagctggtgagggcagctgcgtcacccgtatgtcagggaggtcattcgagagctgtggtctcagccattttgagggttattttaatctttttaaaacagatgtagacgttttggttgtaagttggtgttaaagagaggaggaagttccaaatcccaccccggggcccagcctgcagttccatccgttcagacctgtttctactcgggctctgcctctagtcagaaacctccacgccccgacatggcatctgtgcccttaggaactcttcacaggggaattatttggggccacgcggtggtggaaacctgcagtgctgggcagtgggtctggctggagagccactgcagaagggctgagaaggggcggccccagcaggccccatgcacttacaggcaaacaggctgtcggcccagagccccagcaggggcctggaccccaggagcgacgggcctgaagcagggcctctgtcctcggagtgggaggcagagtgaactttagctgctacaagacttggaggtccggccccgggaatctctgagctatggccccctcacacggacagggcatgagctggggcctgcgacacccaacgttgactgctcagaccctctcgtccctgcctgggcccacacttgccatccccaggctcagccaggatttatggccacctgggtgtcctggcccacgaactccctgccccgggcacccagcctcctcccacctcaccctcccagtgcccactcgtcagatagctgatgctcgccacgcacatgggcctcaacttctagaggagtcccgagagggaaaggggttccccaagccacacggtaggtcgagtacacctgctcagcctgcagaggcggcctgccctcctgcctgtcctgtcgccaccccatggggcaaggctggtgcccgcatttcagaagtgggaacggggacctggaggtcaagtggcttttccgggcatttgagggggtccagcgctcatgaggactgtgctgctgcctgtcctccaagagacccgcccctccctcgtcagcccctccatgctgatgggggcatggggcatgagcttcctagagtttggctgctgggaaggggctgggtggctggactctggtcatcttcatcttggtgtgatgggagcctgagtgtgcagctgcgccctgggcggccagcgtggacagacttcagagtgagctgggggcaccaggcacctgcaggataccgttccgaaagatctagaagccccatgacccggcctggcagggcccccgggcgaccctcactcccacatatgggcaacacacacacgtgtttgcaggcatgcgacggagtgtgccagccagcccgaggggtgctggccgctagaggagggtgaggggcgtctgcagcatggctgcggcacgtggggcccaagtcagggccgggcctgcccctcggtggcctcacaccccaagtcagggccgggcctgcccctcggtggcctcataccccaagtcagggccgggcctgcccctcggtggcctcacacctgttctcccacagcagctgcctctgttctttccactcccagaaatgctcatttttcacggctctgctcagaagatttcccagggccagggccagggccaggctgtgggtggggtgagcgatggcgccctgcgttctgatccagcctcgcccccagctgctgtgtggtctctgagaggggtgggctcagggcctgggcctctcctgccctgatctccctgttaccctggcctcggagcctcccagcagcccctgcagccctggaggcctgtgaggacaggactggtctggttcatctgtcccgtcaagcccccatcccatttgacagaaggggaataggctccgagaggctgtgacttgcctcggcctgcagagcacggagactgtcagagctggggtggggcctatcgtccagccccacagcctgcggtctcagcccgggtacctggcgcctcagccaccaggagagcccccgagtcacagatggggacactgggccggtggcagccaggccagagccagggcatctgacgacagccgtgttctttctaccacacctggctttccctggtgtttgggaaatggctgtgttctgggaaatctttagtcaggtccagggaaaacaggcccggcaggtctctctccccagccccaggccggcctgtcacttcttctaggcagctggccacctctgtccccccagaggcttggggagggcaggagtaccacccctatcttccaggcagagccacccagaaggctggcaggggtacacaggagaccctggagcctggccatgtccctcaggcccccttggtctctagagaccccccggggtatagacagggccccgctgctccctgggtgcgtggttcggggagatgaggtggtataggacagtctgtggtctgtctgtacctggcaaggtcatcacgtgcctgggcttggcaggacagaccctgggtcttcggccagggtgggagctgctaccaggaaggcctgcaggaactgtgagcttgagtgaggaagtaggaaggtgtcaggcagacctcagggacggctggggcctgtgcccggggaggctgtcctgtggccctcagaggagcagctgtggatgtggctgccttccacgctcctggctgggcaggtgtgggctggagaggtggcgtcagtgcgatacacctgaccttgcccctgtccgtgaccttggcaggatgatgatgagagggatgtggatgccagcccgacggcagggctgcaggaagcagcaacgctggcccctacacggaggtcacggctggccgctcgtttccgagtcacggcccactggctgctggtggcggctgggcgggtcctggccgtaacactgcttgcactggcaggtacgcaccgaggcagggggcactggcagtcacactgggaggggtcttggagttccctgatgactgtggagacagcgggacacatggcactggccaggtaccaccctgtgtgcccctgccccgcaggcatcgcccacccctcggccctctccagtgtctacctgctgctcttcctggccctctgcacctggtgggcctgccactttcccatcagcactcggggcttcagcagactctgcgccgcggtggggtgcttcggcgccggccatctcatctgcctctactgctaccagatgcccttggcacaggctctgctcccgcctgccggcatctgggctaggtaacggcttgccacatagcccctttttcctgccaccctggtcccgcccacctggctcgtctagcccctgtggccccactgcctctggggtggtaggctgtgacgggtcttctctggacagggtgctgggtctcaaggacttcgtgggtcccaccaactgctccagcccccacgcgctggtcctcaacaccggcctggactggcctgtgtatgccagccccggcgtcctcctgctgctgtgctacgccacggcctctctgcgcaagctccgcgcgtaccgcccctccggccaggtgagcacctgccacccatggtgggtgggctgaggccaggccatggggctggtctcaggacctcctgcctctgggtggggtgtggagctggtttgggctcaagacgctggtctctgcagaggaaggaggcggcaaaggggtatgaggctcgggagctggagctagcagagctggaccagtggccccaggaacgggagtctgaccaggtgagcagccaggcaggtggagacgccagcgtggggggcgcccggccagcccgtgcatggctcagcgctgcttgcccacagcacgtggtgcccacagcacccgacaccgaggctgataactgcatcgtgcacgagctgaccggccagagctccctcctgcggcggcctggtgagtaccgcacactgcaaggtatggctgggtgnnnnnnnnnnnnnnnnnnnnnnnnnnnnnnnnnnnnnnnnnnnnnnnnnnnnnnnnnnnnnnnnnnnnnnnnnnnnnnnnnnnnnnnnnnnnnnnnnnnntgagaggctgagtcgttgatccacaatacagtatagggggcttacagtgtcccccaacccctccccagagaatgtggctatgctgtcttgtgctgttagctctgggagctgctccaggtggcccagtggccccaggaggccgctcgtccagggcaggggctggcctgggaactctgtgttggccatgtcgccttgggagggcatgggggctctttctggctactttctttctttaccctaaccgttgattttccattttgcaatgtgtttctgaatgaagcaaatgaagccacggccctggggtgggggtcctgagagtcttcaggtgcgcagagctggaaagggggtcagggccacctttcccaccctttcaaggaaagtgaggcccagagaacggcaggtgctggcagggccatccctgacgctcagggacggtgtcagcccaattgccggagccctcgtgttctgcccatagcccaccgggggcctgtctctcctgctgtgtgcttgcccagggcccagattttagggcatagtcagggtgggggggcctgcagatcaacctgccgaagctgaccgctgtccccacctgcagtgcggcccaagcgggctgagcccagggaggcgtctccgctccacagcctgggccacctcatcatggaccagagctatgtgtgcgcgctcattgccatgatggtaggcggctgtgggggttggggtgggcggccccctctgccgcgcaggtgtggggcatcgcctgggtggggtgcgctgggcagctgtgcagccccctctgccgcgcaggtgtggggcatcgcctgggtggggtgcgctgggcagctgtgcagccccctctgccgcgcaggtgtggggcatcgcctgggtggggtgcgctgggcagctgtgcagccctctctgccgcgcaggtatggagcatcacctaccacaactggctgaccttcttactgctgctctgggcctgcctcatctggacggtgcgcagccgccaccaactggccatgctgtgctcgccctgcatcctgctgtatgggatgacgctttgcctgcctacgctacgtgtgggccatggacctcggcctnnnnnnnnnnnnnnnnnnnnnnnnnnnnnnnnnnnnnnnnnnnnnnnnnnnnnnnnnnnnnnnnnnnnnnnnnnnnnnnnnnnnnnnnnnnnnnnnnnnncccaaagtgctgggattacagacgtgagccaccgcgcccggctttttttttttttttttttttttgagaccgagtctcgctctatctcccaggctggagtgcagtggcacaatcttggctcactgcaacctccgcatcccaggttcaagtaatcctcgcatcccagcctcccaagtagctgcaattacaggtgtgagccaccacgcccagccatcaaagtttcttattttcattgtagaccccaagctaagctcagaatattttctgatccgcgttgcaggggctgtgaggggcgaggagggtcatgggggtggagtctctgtgtcccttgggaggccacagggagtggatgggccccaactgcccactctctgcaggctccaggcacgtttcctgcctgctgaggctctggcagcctgggagttccagccgcctggaccgccctcccgctgcccgctgtggggttggacctcaattgactttgatccacttgtgcgggggggggggagctgagaccccccttgggaaccaccttggggtctgagctgggccaggactgtgttgctctcccgtatcctccaaacagagggcggtgaggccacgtgccaagcctgcagcctgggtgacgagggtagcagcaaaccctccatcctgtgacatgtcacctacctgccctgtgggggccatgtccattttgtgcccacgttttaggagagcgcgttttggagcaaacactcagagacctgtccccaaaggccatgggccaaacgtgggtggggccgggccctccgctggtctttgggtttggagggtgaagagccactgaaaggaaggaaggtccccagggagggcaagtgtaggcagcaagagaccttccccagcagagggcagagaggaggccaagcaggaccagggggcgtgactgtggagacaggctcttgggtgccacccttctgggaggtgctggacgcatcaggctggcagcgtcggggcctgtccatggctacgaggtgtccaccgggctgcgtttttccaggggactctggggaggatctgcttcctcttccagctgctccaggtgcctaccttcctgggcttggggcccctccctccatctccagagccggtggggtggggtcaggatcacaccctgtctctcctgctccctctcccctgcggtaaccctgtggcttcgtcccatctgcctccccggctaatccaggccgacttccctggtttaaggtcagctgttgggcagcccccatttcctctgctgcctggactcgcctctgcatgtgagcttctgcgttcacagattctggggactggggtgcaggcatcattggggtccatcgttctgccagctgcaggtggaaggtcgctctccggcctcgcgacatctggctggaagcatcccagaggctcctcctagctcgtggtgctgtggggtgggcaatggtcttttttatttattttttttgagatggagtctcactctgtcacccaggctggagtgcaatggcacgatctgggctcactgcaacctccgcctcgcgggttcaagcgattctcccgcctcggcctcccgagtagctgggattacaggcgcccaccatcatgcctggctaatttttgtgtttttgtagagacaggggttttaccatgttggccaggctggtcttgaactcctgacctcaggtgatctgcccacctcggccgagactacaggcatgagctaccgtgcttggctttttttttttttttttttccgagtgggggtcttgcttggttgcccaggctggagagcagtggcatgatcatggctcactgcagcctccacctcctgggctcaagcgatcctcctgccttagcctaccaaagtgctgagaatacaggtgtgagtcactgtgcccagcgcaggcactgatcttggatcatgggtagaattcaggggtgcagagaggcattttgggaggggcccagtgcggccgagtgctgggagtcgctggggcccgaggcccaaacccctccaggatgcatggctggagtgggtgggcacccccactcccggtccctatcctgggcctcccctttgctctgtggagccggttctgtctgttcccaggcccctggcgtttcgccgtttgttccgtaaatatttcatgcccagggcgcaattggaaacactttcctttaatcagcagtgggggaaggcaggcgcccagccaggccaggggaggagctggggtgggaagatttggagaggacccgggaggacttccctgcctgagcctcgtcagaggcccttcagagacggagacgctgcccagttttccgggagggagagaggaaagtgtgaggcttgcccgagccgagtgcccggggctttatgatttgtgcagctgctgggcttggcgtggccctggtggaagctctgacgccatctgagccttggtccccttgtaggcatcagcctgatccttggggggctggaggttgagctcagactgaacagggaggagaggagcagggactggggctggggcagagggaacagaccctggtgctccaggcagggctgcaggcagagccacagggggtggctcccagagacctgcttgtcatttagggactcagaagccccatcctgccttaggataaaacccacctccaagactgaccctgctgtctggagagagaccaccccccacctcttaccatgccccctgcagggaggccctgccaccctctccagcttcactggtcccccagctctgccagccttgtgtagtctccatcctctgtctcaaaaggcccctctcgtggccccaccccacagctcagccctagctgtcgctgggtgggcctcatggctcagcctcaaggcaccctgggtcccttggctggtcccatgcacaccccatggatcaggttccggggggctcccatgcacaccccacggatcagactcagggcagctccacactccccacagaacaatcaggcccagcccttgtccggcaggtgtggggatggtggctatggaccacacatcaggatgctgccgtggtggggcccctgagcctttgcagaccgtgcaggggtccaagggctccggctctgggggaggtccatgctctgtcaaccatccggtctgcgataccctggggcctccccgccccttcctgtttcctcctgagagccctgcaagctggagggggagccccggcccctttttttttttttttttgagacggagtcttgttctgttgcccaggctggagtgcagtggcgcgatctcaactcactgcaacctccgcctcctgggtttaagtgaaagtgattctcctgcctcagcctcctgagtagctgagattacaggtgcccatcaccacgcctggctaatttttgtatttttagtagaaacagggtttcaccatgttggccaggctggtctcaaactcctgacctgaggtgatccacccacctcggcctcccaaaggtgtgaaccaccacgccaggccccctgcaccttcttctgggtgggcaagagccatgctgagcccctcccctgccatggataggggtggcaagaatagtccattccccatgggctccctccggcaggcagcggatgggttggggcccacacagtggttcaggaacaaaggctgaagggcggttaccggccagagctgggcgggtccctggcctgagcctcctctcactccctttcccaggatggaaaggccactgtgagctgggtgtgtcctgccaggagggagttggagtcgggggcaggagacccactgggtctcctgggctcctggaagaggcagcagtgggtccctgcggaggtggcctgatccccggctcagcctggttttcccagctttgcatttgggggtgggacctgcagggggagagtgagggggtgggcggggacaggggctgcaggtggaggcacgagaaagccacccgaccccttgaggtcatgctgtttgcgtcggagaagagggccggtgtcagggtgccccctcggcctctgtgtgcacctccccgctccccgccccgtgcaggtcagcagagcctcgatccctctgcacgttccggccccctcccatctccagcagcgtctcttcccggggtgcccctcggactctcagctccctagtctgatccagcccaggcagggagcgggcgtgccacgtggccaggagtggcctccaggcccagctgcggccccttcgaccctggggagggatcatggcccagctgttctaacatggccagaccaggacactctggccggcccgagaactgaaccgggaaggaggcagggaaaggggagggaggaagacaatggggaagcagtgacgtccgagatgtagccagagacggacatcctggactgtcgtgcagggcaaggcaggtgggcgggagccaggtggcctgagagcccctccctgcccaggggtctctggtcaggcagttccttcccgggctgctggatcgtgtgtgcagggaacccgtcagcctggctgcccaagggcccagatgtcctctcagtgcccgggggtccttgacagccccagcaggagccccacgtgcctgtggggcaggccccgcaggtccctctctgtaggactcagaataccttctccaatgccacgtgctctccctgagtgcccagtgccacagagggccccgctggcgaggttacttcaacgtcaggctagagggtgcagcgagcaggactcacaggccaggttcccaggcaggtgtggcaggagcccattccctgggtcggtgttctcatgtctccccacggtgaccctgctgtacagaggcgggggcgcggggcccctggctggtgccctcctgctgccagacttgtgctctgctgaagaggggctggcgcggcaggtatgagcccggcacggaggtcgtgagcagtgagaagcctggcacctatgggttcggggcagggaggccctggaaggtcctgtcctccgggagccctgcacagcaccccctggtggtggctcctgttcgtgtcggggctgcagcctcccttcctggacggttttccattcctccttcccactctccctgctgctcacccctcccatcttccacaggtcagaggtcatagctgcagggtcagcaggtcagggcctggggcaaccctaggaaggtgtgagtgtgagaagctggtccaaacctgcctcggctgcctggtggtgcggacagggagtcctgggcatccgtgagggctgcctcacggtcaggcttagggatgtgcagggtgacttggacgtgggtcatgagtctttgctccagaaagagggggctgagtgtccaaggccaatcccgagtctgtcacctaacaccatttgtgctcaaaaaactgaacagagtggacacaggccctgagtttgcgccccgaggccgagagagggcagatgtggtggtgacattcaccaccttggacccagacccagatgctacctgtccctgagctccaggaagttgtgagaagggcctgagctgttctgcactttctcgtggccgggcgtggctggtggtgcaggagttgctgccccagggtgagggcccggaagctcctgccagcaggtgccggggtggaaagggaagctgtccacagccctgtcaggactcagaacccggtgggtcaaggactttggtccggacccctgctgaagggtgagctgtccacatgtgcgccgagagcagaggtgaagccagggctcctgagtgcccccagccacagggtgcgcccgcccagcccctgccctgcagccgaaggcctccctgctggggggctgagtccagtggggccacaggcagctgggagcaggacaaggctgccaggcaaccaaatggtgctgccgcttcctgccaggtgtgggtgcacagagagagannnnnnnnnnnnnnnnnnnnnnnnnnnnnnnnnnnnnnnnnnnnnnnnnnnnnnnnnnnnnnnnnnnnnnnnnnnnnnnnnnnnnnnnnnnnnnnnnnnnatctcaacatccagccagaccgggcgccactgtgtgcttggtccccctccgtgaaggggaactcactactgtttatggctgcccacaccaccgtctgagggccggattgtcagagggagggtggttttttgtttttttgtttttttttttttgtttttaagacggagtctcactctgtcacccagactggagtgcagtggcgtgatctttgctcaccgtaacctccacctcctgggttcaagtgattctcctgcctcagcctcccaagtagctcggattacaggcatgtgccaccatgcctggctaatttttgtatttttagtagagacaagatttcaccatgttggccaggctggtctccaactcctgacttcaggtgatccacctgccttggcctcccaaagtgctgggattacaggcgtgagccaccgcacctggccaggaagggtggttcttaagctggggttcagtggacacatcctgtgtgatatgggggttctgagaggcagacagggttgttttcagagcccccagcgaaagtggctttcagtgccagtgccaggtggctggcagccctgtgctcttgggagatgaaggggatggacatggtatttgccgtgtgcctttcccgggatgtgtcttctgcctggcagatggcctaatgcctagttgtctgacctgcaaccatgagtccccccaggaaacttgctcacactggcagacgccccgtggctcctgtctgattcacgtccaggttatgcctgcctgaccatcgctctggtgttgggagcctgccctctgtcccccacgtccccgagaaaacccagcctgggcagcccctggttcttccttgtggaaggtgcaaattcagtccccactgcagtaggaaacatgttcaaagacttactactcacaggtcttgggcagggagggcgccaggagtgggaagggccatcctccgtccccagatcccacagggcagaagtgaagagtcaggcagagagaagacagtgtgtggtaacgggccgtatgcacagggaatggggagtggtcactgcaggttcacaagcaaatgcctgaatggtctgattaaaggaagtgcagggagtgcgggcagcccaggctcctgggtgggagatacgcccctaagtgctcatctctggcccctgacatgggcggttgagcgtggtgtcctcctggtgcccaggctgcaggcttggctgtgctgcccgttagaacagtccctacccacaccaaacgtaagacacatgaaactgcacaatgcctcagcacaggcaagggagagtgaccggtgctgaggggagcccttgggcctgcggcagatgaggtgagacttgagccatcaagcagcgaggcagcgtgcgtgtgagtctgcaggccacaggcgtgttcgtgcgtgtgtccatgggcgtatgcgtgtgggaagtcgcagtagctgctctgaggtgacatggaggctgggcatcagcgggtaagtcccgggcaccaggagagggatctgtggggtccccggcatcgtcctgccgagttggatacctgagctcggttccagcaacaccatccgctctctgccagggtcctttgagattcccacctgccgtgtgagggagctgacaccttactcgcggcaggctgtggggccacgccctgcagctgagggaaggaagaactcaggcccgctgagtgttcttttgtccagccacaaagggagcaatgcctgccggacgaggggctggggccgcatcatacctgggacccggatgagcactgtccagggctcctgcgaacaggggcgggcctgggacagggggacctggggtgggagacataggagaggggacccctgggggagagggacttggcatcccttccggatgcaggccagcagcaggttacacaggcccttcgtaaaggtgctttctctgtggcctgcgccctgggtcaccccatcagcagggtccttggagccccagtgcctgcagaaatgccagggacagcattgacagcgtgctgacggacagcaccgtggattgaactgtgtccccctaaaagatgctggggtccccccaacctctgggcatggggccttattgaaaatcgagtcttcacaggtcccatcaagtcaaggtcaggccattaggtgggccttaatccaaggactggtgctctgatgaaaagaggaagcttggattcagagcgcagggggagggtgacgtgcgggtgcagaggagttgtgtgttgaccacaggagccagccaagaagcaccaggccgctgcggccgcccccggcccccacccctgccccatggcacagcccgcccacacctgggtactagacttcctcctgagctggcgacacttagactcctgttgtgttcggcaccccagggtgtggccccttgatacagcggcccagtagacccagcgtccagaccgggatgaggccacaggccctggcttgcccctgattcgagggactcgtggaaacaggccactgctgtccatgcagaacacaccccagtccccacaaacccacagcaggtgcactgagggttccgagaaaagcaccacgtgggtgccactcccgtttcctggggctggcgccacagccgctcctctccagagactctgggaagctcacacggcagactctgcaggggttgcactggccccgggttcagcatgccatccaccactggaagagcccaaaccgcggccaagaccaggactgcacgtcagagggtccgggtgggcttccagccaggcttctacctgccgaggccctggctctgagtgggtgccatgtggagtctccccttgccctgcaaaaatgtatctccagccagccacagtggctcacgcctgtaatcccagcactttgggaggccaagctgggcggattgcttgaggtcaggagttcaagaccagcctggccaacgtagtggaaccctgcccctactaaagatacaaaaattagccaggtgtgatggcgcgtgcctgtaatcccagctactcgagcggctgaggcaggagaattgcttgaacctgggagactccttctcaaaagtatctctacttgtgcccgagagcccactgataattagagatgcattccttaggctatttttgtcaaaataccaaagtgcctttgacattgtgatgccttgctgagtgcatttaggcctctttttcctagagtgagtttagagagtggcgaaccctggggatgtggttatagaaggaagggcggcggaggcagcaacaccggagatggctttttcaggccatccctcgatggggccgggtcctcccaggtgtttcggatcggaggaggctgactgtagctgagggcaccctcccttcccaccttcctcctccctgcatcacatcctgggcagagttaggggtcccccatggaggcctctggggttttccaggtgggctgccaagtaggtgccctggctggaccacagggtggaatgtcagccgggtttgcctcttgttagcaggagatttggggcaggttttctgaatatctgttttcatccatgaaacaggaaaagtggcttctgcttccttccctagggcctcaggagcctaaacccaggtggccccaaattagaggaatcctcaggcaccacccagacgcacccagaggatcctgggagggtcaggctgctgcggcaggtgtgctgggcccccccgtcgnggngtcccggcgcgcnggccccctgccgtcgggagccccccccctctccccccccccgngccccgcgccnnnnnnnnnnnnnnnnnnnnnnnnnnnnnnnnnnnnnnnnnnnnnnnnnnnnnnnnnnnnnnnnnnnnnnnnnnnnnnnnnnnnnnnnnnnnnnnnnnnncccccttccccaccccggccaccgcgcacacatgcagttatggaaaggcatgggatgagtctcgcgaaccacaccctgctgccgccgccttggagtacccaaaatgctggtcgtggctcatgagatccaggtataagaattatcagcagtttcttgggggcccggcctggggccaggggctctccattcccacctgacccctttctaatggagaagttccctggtccctgagacctggacgcgctttctggggagcagggttcatgcttcccatgcagctgcataacgtgaaaacaagggcatgctgccccaagtctgcgacgggcctggaccgcgcagggcaggagccccagctcctccagggcgagccacatctggctttgtgcctcgctgtcag

SEQ ID NO: 1876 - protein, 1493 aa, Homo sapiens
  MOD_RES (267)..(300): Variable amino acid
  MOD_RES (1378)..(1378): Variable amino acid
  MOD_RES (1392)..(1392): Variable amino acid
  MOD_RES (1396)..(1429): Variable amino acid
MPWGDPSYKSANFLQHLLHRHKFSYDTFVVGIPPAPSSPTPSSSTLLLLGPLASLRVRRVQRKPETEASFQVATFPQVLWGLPAVVRDPRSACLRMEIVRGQGALAGLLTSQTPGLESDLNQQPSIPSAPVPSGEAQPPACVWGQGCPRSCVAPGTCSGVHLTGLSSQEEPAPAQKGSRGRASGPEYGPAAEAARAGPPGPTGVAGFFGASGRAGGLLGQGWTLRPGAATVSSSHDTPSWEEGTDARVAAAQSSPGGTQAAALASPXXXXXXXXXXXXXXXXXXXXXXXXXXXXXXXXXXPQPPGRQLPAPLFSRAIMALLPPQPRLLRGAPHALVSIHLQPPLGPILLPPPGGCPAPCDKSDPREAWGVGLAGLPDGVLSPWRVCISGLWALAGLGAIVRLSGLGCGPSPSPGPASPTRSAAGHTGRLLRALLGLSLLFLVAHLALQICLHTVPRLDQLLGPSCESLRGRGRDSHPGGQGEGPAVTPSLLGGLTQPDLCLAWMVQVKRSRDDQATVLAGQSLTWVPPSFSAGSRWETLSRHIGVTRLDLKDIPNAIRLVAPDLGILVVSSVCLGICGRLARNTRQSPHLRELDDDERDVDASPTAGLQEAATLAPTRRSRLAARFRVTAHWLLVAAGRVLAVTLLALAGTHRGRGHWQSHWEGSWSSLMTVETAGHMALARYHPVCPCPAGIAHPSALSSVYLLLFLALCTWWACHFPISTRGFSRLCAAVGCFGAGHLICLYCYQMPLAQALLPPAGIWARVLGLKDFVGPTNCSSPHALVLNTGLDWPVYASPGVLLLLCYATASLRKLRAYRPSGQRKEAAKGYEARELELAELDQWPQERESDQVSSQAGGDASVGGARPARAWLSAACPQHVVPTAPDTEADNCIVHELTGQSSLLRRPGEYRTLQVRPKRAEPREASPLHSLGHLIMDQSYVCALIAMMVWGIAWVGCAGQLCSPLCRAGVGHRLGGVRWAAVQPPLPRRCGASPGWGALGSCAALSAAQVWSITYHNWLTFLLLLWACLIWTVRSRHQLAMLCSPCILLYGMTLCLPTLRWKGHCELGVSCQEGVGVGGRRPTGSPGLLEEAAVGPCGGGLIPGSAWFSQLCIWGWDLQGESEGVGGDRGCRWRHEKATRPLEVMLFASEKRAGVRVPPRPLCAPPRSPPRAEAGARGPWLVPSCCQTCALLKRGWRGRYEPGTEVVSSEKPGTYGFGAGRPWKVLSSGSPAQHPLVVAPVRVGAAASLPGRFSIPPSHSPCCSPLPSSTGAGVEREAVHSPVRTQNPVGQGLWSGPLLKGELSTCAPRAEVKPGLLSAPSHRVRPPSPCPAAEGLPAGGLSPVGPQAAGSRTRLPGNQMVLPLPARCAGPPRRGVPARXPPAVGSPPPLPPPXPRAXXXXXXXXXXXXXXXXXXXXXXXXXXXXXXXXXXPFPTPATAHTCSYGKAWDESREPHPAAAALEYPKCWSWLMRSRYKNYQQFLGGPAWGQGLSIPT

SEQ ID NO: 1877 - DNA, 34551 bp, Homo sapiens
  source
  (1)..(34551)
  CDS (201)..(371)
  CDS (657)..(890)
  CDS (2241)..(2414)
  CDS (3202)..(3349)
  CDS (7742)..(7890)
  CDS (19737)..(19817)
  CDS (24050)..(24316)
  CDS (25959)..(26162)
  CDS (29915)..(29999)
  CDS (34152)..(34351)
cccagatgtcacaggcataccagcttgtatctaggcattgccccctgcccttcccaaatcccacctgctcaggaagagcagaaagctgagccagtgctggaaggcaccactgccagggaggggggctctgccgagcacccttgcaagagcatgcccaacagcgtagcttcaaacagcacatagaagtgccaatccattttatgcttctgttttttcatcacagatttcgagtcctttgggatgaagaggtagcaagggtgggtcctgagaaggcctctctgagccacgtggtgtggaaattccagaggacacgcgtgttgatggacatcgtggccaacatcctgtgcatcatcatggcagccatagggccggtgagtgcggcagcccttcctcctcatctgctaggtccccagcctagcaaagaatgtcattagttactttctctacgagctggtgggtttagtgcattgtcattatctttgcgctccttgggggcgaattttcataaagtgaatccttgtcaagcacagcagcagccactaaaattaattaaaaagtttgcctcttaaagtcagcttgctggcatgatctgaggcctcctatgccagcctcagccctcagtggccctctcttctccccaccatgctgttttacagacagttctcattcaccaaatcctccagcagactgagaggacctctgggaaagtctgggttggcattggactgtgcatagccctttttgccaccgagtttaccaaagtcttcttttgggcccttgcctgggccatcaactaccgcacggccatccggttgaaggtggcgctctccaccttggtttttgaaaacctagtgtccttcaagacattgacccacatctctgttggcgaggtaagctggctcagaggagtttaatgttggaaaatgggccctgagtggtttgagtgcatgtgagatgtggatcctgagtggagcacctgccttccttttgcttgtctatgacctgcccatcatgtcccatctcctggctaagtgaggtggtggagacacagaacaccagaggagttcagagagggagggctcagttcaggctggagaatttggagagacttcctagttccagcgggaacagggctcagggagacttaatccaatcgctttgatggtcagtggggactgtggaggagtactgagcacactataggcatttaataaaatggatgaactgatggctccaataatcccaattgtgtagcatagggggtgccaaaaccacaatgaagaccatgcctattggacttcagagttgacattttcttaagctcttaatccttaacacttatcaaaaacaaaaaacaaacaaacaaaacacacacacacaacaacaacaacaaaaactcttgaatcaagggaaccccaggtggtgtggggtaagataaaagacttgcttctttcttactagttgctcttttagcaagctcaaagcatttaattatgattagattcagttgcatatagcaaacccaaaataacagtgaattaaaaaaaagtaattaatttcactctatgtaaaaggaatctagaagggaataatgcagggttggcacaggagcttccagatctttctgcttttctttatcactgtctttgcacatggctgtcatcatggttcaaaagtagatgctagagatccagccatcccagccacgcttcagacaggtggtaggagaaagaggaacagaagaaggggtgccttccaggttgagttggctccctttaagaattcatcacaaatgtcccattctacactttggcttacatcacattgccctcaacatggacacatggccacactccttccacaaaggaggctgggaaatgtagtcttttctgggcccatctcttcccgaaagaagcggagttgtcttcacaaggaaggctgagggagaagggggtgggggagactgggtaggcagctagcagtccctccagcatgctcccagatggtaacattacactttgtctttctgcattgagatgatcagccctaaaagaccagcctctccaaagtcgtaccagaacccataaaactcatcatattggtccccggtgaccccttcctgctttagagaagtttttctcctttctccctagatcccctcggccaatctgaaagccttcatttaaagacatgtttgactgactcttccaaagcctgaacctttgcgcttttctttccaggtgctcaatatactgtcaagtgatagctattctttgtttgaagctgccttgttttgtcctttgccagccaccatcccgatcctaatggtcttttgtgcggcgtacgcctttttcattctggggcccacagctctcatcgggatatcagtgtatgtcatattcatacccgtccaggtaacggcaggcttttgcgcttctaactgctttgtatttgcatttcacacactttcactgaattgggtggaaggctgcatttctggcgcatgaagcctgtgccccattttgtactcacagatttacttcctttggcacagagtagtggttttttgtttgtttgtttgttttgttttttgttttgtttttgtttagtgacagggtctcgctctgtcacccaggctggagtgcagtggtgcaatcgtagctcactgcagcctcaacctcctgggctcaagcagtcttcctgtctcagtcctgccaactagctgggactacaggtgcatgccactgtacctggctagttaaaaaaaaaaattgtagagatagggtctcgctatgttgtccaggctggtcttgaactcctgggctcaacccatcctcctgcctcagcctcctgagcagctgggattacaggtgcaagccactgcacctggccacagtgaaggtttttaaaaaaagcttgaatttgaatgctctaggaagtggaatgcctcttcaatttgtcaaagcccccagcactctctttgagtcctggcaattcatgcctttacatgacctgcctgaccccccatggtgttcctcagacagcatcaacagccacaactcaagggaagaacttggctgagaatctgaagccaacttcctttagaactttttctggcacttacactcccatttctggatttttaggccagctgcaactcagcacttctctctgaaaacagtgtttgtaccttgatttcagatgtttatggccaagctcaattcagctttccgaaggtcagcaattttggtgacagacaagcgagttcagacaatgaatgagtttctgacctgcatcaggctgatcaaaatgtatgcctgggagaaatcttttaccaacactatccaaggtaggacaagagtagctgcttaaagaaccacttaccttgtagaatatgctcttctaaggggttcttacggttcccagggccaggcattccagaaggaggctgaggggaccctctgagctgctctgcaggtcaaagaatttttcaaaggattatggagatttaataatagagccaggcatctgttctggtgaacccaggggtgagtgacatatggtttctctttcctggggcatgtggatcctggtcctggcgagttactttttataaaaataatccactaaaaacattgtgagcaggaaaaaagctgtctccagctatttacttaacttagaagacatctacacacacatacactcacacatccagggttacacagacctctttgcctgcagcagcgtccttgtgttcggatggtccactgactcaacactccttgggcagacacgaggagatgcatatgtagttttactttttttaaagctgatatagaaactattttgatcaaatataaatgcaaatctaattgcagggacatttacataattgctgacatagactcaggtggttcaccagttaatgatctgaaccactgttacaattgactgtctggatggacaattacacttttgcaccagcatggaattgggccaaagctgtgtatctgccctctagggagtggctgtagagaacctgcttctgagctggccaaaggaagtgccccaggttgggaccccagcagcactaggggaccctctttgaaaacccagaaacacatcctcacactctgagttcacttcagtgcaatttaatttgatttgattaaatttgattccatgtgatttcaacttaatttaacttgtcgatttagttcaataaatatatatcaagttcctactttgtgcaaggccatgggagctacacaaatgaaatggaaaagtttcctgcttttatgagtaagggaggataagataacttagctcaaaaatagccacgagtttgttggctctaccttcagagtatatccggaagccatctgctcgtctccattccactcccacccagtccaagccaatatcctctctctcctggactatgcaagacatctaggcactgctcctgccttccccctccctcctgcaatccattgtgcactcagcagtcaaagtgacctttaaaagatgtcagtcagatcctgttcctcccctgttggaaaatagtggcttcttatcacacttaagattattcaaagttaggtctttggaaggaaatccaaattctttcatatggcctgttaggtcagacatgatctggcccttggtgacctctctgacatcatcatcacactttactgtaaccttaggaaactcagctctagcggtgtctgccttagtttgtttctagaaccacacgccacactcgttcatgcctcgggatccttgcaattgctgtttcctttgcctggagtgcgctcctgctggatgtttacagtaactttgtcttgactttaggtctcttctcaatgtccagagaggacttctgggctgcagttccaagcatgtccatgccctacctctcaatcacttcatcctgctcatttctttcagatcactcaacacaatttgtaattatttaattgtttatttctttcttgtctatctatcccactggaagagggccgagaccctgttcactcctctattctccaaacacaggtgcagcacctggcatgtagtagacatcaggttcaaatatcttaagtgagtgaacacatgaattcacgttattctatgggggaagatggaggaagtgccacaagagaaacagagatgctccatgggggagcacactgggttggggagactgggaatggcttccctgcagaagtggctttcaggtaggccaaagggataggaaggattgggacgcacagagaactggggaagcccacttagggaggagcagaggcctggaggtggagataagagggtgctcttggggactagggggtgctggatgttctttaggggaagggcacctggatagcagagcttggatcccaggagaagtgggcttcgattctgccctgatcactgaaaaggcaagttttcagtgaagcaaacctgcgcaagcaaaccttcgaagacagtttgctctcctgtcaaaaaggcataaaataacagactctctctcatcatgcagtggtgaggacgatcttatgagaaagcacctgtgaagtgttgagcagagcacctggcatgtagtgatcacgccattagaacatctggagctgtcctgtgtggatatgaaagggcttttgcagaggaggctggaattggggttgaggacaaaaaacaggaggtgaaggaggcttgaatgtaatttgtgagctttgcagagccgtgggcatgttctggacttaggaaggggagaatactcttgagtttttgtgtctattcttgggacaccaggcaggtgccttcaggccagcacatgtgttttatttctccccatacagtatagtatttaaaaatgttttttcatttagttcccaacatttaaaaatagggagatgtctcagaaaaatctggacctcatgggaggattgcttgagcctaaatattcgagactagcctgggcaacatagggagatcccaactctgcaaaaaattaaaaaaaaaaattatctgggtgtggtggtatgtgcctgtggtctcaggtactcaggaggctgaggtggaaggatcgcttgagcctgagaggtcaaggctgcagtgagctctatcatgtcattgcactccagcctgggtgacgaagcaatactctgtctcaaatataaataaataaataaaaatctggacctcagactttgaaatggttgacgatctggttgttactggaccgaactgtggcctgcttatctggcacagtaaggccaaatatccacgctgaggttttgccgcaggagaaaggagggcctttatttgctgcgtgccaagcaaggagaatcaggcggctcatgcttaagacctggcctccccagtggcttgcaagcaagggtttttaaaggcagggctaaatttcaggaaagcgaagttacaggcaaaatcgtaactcatacatggagattatgtattggtttggcctgaaagggtggggtatcttttttttttttttttttgagacagagtctcgctctcgcccaggctggagtgcagtggtgcaatctcgactcactgcaagctccgcctcctgggttcatgccattctcctgcctcagcctcccgagtagctgggattacaggctcccgtcaccacccctggctaattttttgtatatttagtagagacggggtttcaccatgttagccaggatggtcttgatctcctgacctcgtgatccacctgcctcggcctcccaaagtgctgggattacaggcgtgagccaccactcctggctgagggtgggatatcttaaagtaggcagcttataaatcatgggtagattgaaagattttctgatttgcacctggttaaggaaaggaagctttgtctaaagatttggagttagcagaaaagagtgttggatccggcctttgggcgtgacctcctccaggcccctcaggaagaaatttagaacaaaaactgcagtcagagctctgtcctcggctcccccttctctgaggtctgtgtgccaatggatcaattggatgggggtccaggttttctgaaatacaactcaaggacatatgttaagatataacctttagtttctatagggaaccaaacattcttgtgactctaacttccttggctgttgtttcaggctattgttaccttcttgcttatcaagttactcatttacttctaggggttagctgggtgcctagaatttcccttgaaggaactcaagattttcctttgtttccatacttgcagttggtggggagcaggctcctaggagaggtccctgctgcatttcatggtagcaccagcctcccctgcactgagaagaggctgcccctttgattctcctctccattctgctgcgctgcagagccccgctctggtcttccctcctctctggccccacttccttcattaatggtacttgcctggcccttctaagcatctgagtttatggcttctgacacacagagtgtcagggctggaagggaagttggacaccatccacttacggcagctgacaggtaccgagctgtgagtacctgctgggtttgtgcccggggctttctgtggttcctctcatttaaacttcacaacaggactcatgagcgcccatctggaagaggaccaagtagggctaatacatttcataatgctagtgttcgacatgcaaaatgagaccaccttggactgtgttctattttgcagatataagaaggagggaaagaaaattactggaaaaagctggatttgtccaaagtggaaactctgccctggcccccatcgtgtccaccatagccatcgtgctgacattatcctgccacatcctcctgagacgcaaactcaccgcacccgtggtaagagctggctccagatcgaggctctttcacaacctgaccccggcaagtcccaggtgggaagcccttcctaccgtcgctcaatactggcattaggaacatccaatcatggcaggccacaggatgtgacttcaactccaactttttttttttttttttctgagacagggtctcactcagtcacccaggctggagtgcagtggcgtgatggcggctgactgcaacctctgcctcctgggttcaagcaattcttctgccacagcctcctgagtagctgggattacaggtgcctgctaccaccacacctggctaatttttgtatttttagtagagaccggggtttcaccatgttggccaggctggtcttgaactcccgacctcaggtagtccacctatcttggccttctaaagtgctggaattacaggcgtgagccacagtgccgggccaactccaacttttaaaaacaaatgcttgggctgacaaggggcccgggagagcctggcagcggttcttaatcacgtccatggctgggcaggggtcatagttaatgttggaatgcaattttaagtgtggaaaaaaaaatggaaaccaaacaagcagttggctgttttatctacttacactacaagaaggagagtttgagaaaattttctcggagggaggaggtataggtattaagagaagtagtggtgttggggtcaaagtctgggcttaggagcccagtctgccttgtttaaatccagactctgctacttagtagctatgacttatagcaaatcattgagcctctctggcctcggttttgtaatctgcaaatgggacgataatagccacaatcagcactgttgtgaggactgaatcagttattttgtgtaaagcatgtagaaccatctcaggctcttaggtcctatacaagtgtcagctattcttcttagcctgattctcatctgggctaggcaaatgaggattgaaagccttagagggagaactgggatgaatgtgagatgttcaagttctttacaaggggcctggacatccaaagataacgaaatgctaagctagagggaaaatgattcctggcttaaataaagaaaaaaccaactaaatattaaaccaagtaattggaggaaagccaacaaaggcaacaaaaaaatgagagagagagagagaaggaaataagcaagttcatagaggaagaattgcacctaaaatcagggacctcacgggggaggaaagaggtgacgtttgcaaagccagaatggtcttgctgagccatcctttgtggggcccatgactgccctgtgtttaatcccattactgccctgtgtttcttggtgagttgcttttattttctctggttcttcagcaggcaatcactcatgcacagtttattctgacacactttagggccttcagcccagctgtgagcccaaagccagattgaatggcaaggatacaccaaggctggatgtaacgctgcccaattattgtggctctctgtgatcccagaccaaaaagaaaactatttttttcctccagcaacatatcaagcaaatcaacttgaaatcaaattgagagcatgtagttcatattttccaacatgatagtttagagggaatctagaccaaaaccaaatttgcaaagctctgggtcctttggattcagaactgattgcagtcgcttctctgctagggtcatgtcaggagttggtcagccccagggtattcagtcacatcaggctgcccatgcgctctgtcagccaggcctgggcttcctgagccaaggtggtgctttgggacctggaagaactgagttccctttgaggatgtatttaggaccagatgtgatagaagcatctttcattatccttttaatgaagggactaggattagttgaagcctggggccgtgtccatggggcccatttaacagcaggcaggatcactcaggatttgatgaagaaagttgtattattaatttcttaaatgggtagctagggagcggctgctaattacaatttggacagatgagaagatgaaattggagagatgaaatcatgtacccccggggcaccaaccgaagggagaaggcttgttttcattgaggctgtagaatattaaccacccactatgcagggcacagcaaggaaggccccatgaacagaggtgattttttggagggaagggtgagggggaaccacagttgaccaaaggctctcaaatctggccttgtgtggtgaatggggaggcagggcatggaggccaggtcctgggagcaggagagtgaggtcaccctccagcttcccccaggggcaagcaggtccctccagggagcctccggctgcatgcctgaggctgtggtgtggtgtagtctaactctaaagggtcagatgcctctgaagaactgagagcagggggtgctttaggacagtctgcatgggcttcgagtgaatagtctagattcaaatgaggatgcagtgtggatggagattgccaaatgtattctgttagtggcctgcctcagaccttttcccttctgtatcaacagagacaaggggatatacttgccaccattttggtgaaaatcccaaagcaaaatagatttaagatgctgctgtccccagctggccaaccgatggtttctgagccatgaaatgaaaagattgttcctctgcacattccaacgatgccaccatttctcatctcagcaagtttaaaccccatgtgtataacggtttagagccaacgtgacttctccttctaaaccctcatacttctcttttgttcttcaggcatttagtgtgattgccatgtttaatgtaatgaagttttccattgcaatcttgcccttctccatcaaagcaatggctgaagcgaatgtctctctaaggagaatgaaggtataactaaccctgggtgagtagggaagagagatctcattttggggtgggaaaatgctcagatatgtggaggctgtaccaagctgctggagagctgggtcgcttgttgagttgacattgggaggagggcatccattcagagttagatgaataaatgtgtatgaaggacagagcaggcagagttttataggttgtctgtaggaatgacgagataatctctgtacatgaagaagatgttcctgatcctctttttcctaaacaatctatacatcctaagtgttccacaagtgaggttggttttgttctgagtcatccccactttacctagtttgttctttaatgggcatggtgatggaagtgatgaagaggatgttggggtccctacatttatgcactcatttagtccctttattcattcatttattcactcatcaaagatttactttgtgcctcctatatataagacatgggaaatgcaaatataaggaagagagaggctttatcctcaagagcctctgttccagtgtgggacccaggcactctaagaatttctatacatgataaggatataattgacatttgagaagggcaaataaagtggtttgaaagttcaactgaggagaggaaagggaagaagggcatttgtgtcaacacgaaagcttgttcaaacatctatgaattgattgaatgatcttactcacccgagtcagaaatccagaagtcatcgtaagcatcctgattcatgcactcctcttttcccttaccatacacatccaaccagtcaagaaccctgttaagtcaactcctgattatggtattctctccattttaaggggtgccattgtaagattggattggaaggtacactgttgagttatcagtctttgaacaaacataaggacaccatcacattaattgcatgtattatgatatcagataaaaaagtaaaggtgctccttagactagataaaggatggcatttcttgactcctcaaccttcgctctgtccctactgccattgccttcagttgaggcttccattatctctcatctgattagcgcagtgatttatgaactaacctttctttttctaacattcttctcaagtccgtatagcactcaaccccaagagagctgtcaaaatattggtatgattaccaatacttattctcagctgctcaaaatccttgaacccttgtcccctccaggctctccagctgtgggttctcagttttgtgtccccttcccttcccaacttgagctctgtgcctcagtaatcctgaattgcttgtttcatgctaccaccccaacaaaccatggctttgcatgctccttgcctttgtccatgctgggccttcaggtagaatgctgtcattctctttcccttttctcatctctgcctgtacaacacctgtacagacccagctctagcaccaagtgcatggacctcgagaatgagagccaagtgtcccttctctggcagtcacagtgctttgtcctcatcacattttgcagaaacgatccgtgcatgttctcatctccctccagactgtaatctcttcaaggacaggaactgtgtcttatttatatttgcatttctgctgtttaccccaaagtctggcacatggttagggcttagcaaatgctttgttgaactgggctgagtggcctcggaagaggacacagcagagactgagcatatgaccttgatttcataagcatttagtgccaagcagtgaagtccactgcccaaagactggtaagaccgactgtcttgggcacaagggtgaaatgtggctgggatcagcattctccagtgtgggtgacccacataggccttgtggttaaagaggcaactgtcccagatagcatgagctagtggactatttctgctgcagcttctcctgggggaataatttcagaacctctttcctggatgtggtgggttagaatagccaaaattgtgatttggggtcattagaagatacattgggatgattcttgcaaatggatgacatctgctcagttaattttgtctctttaatcttagaaaattctcatagataaaagccccccatcttacatcacccaaccagaagacccagatactgtcttgcttttagcaaatgccaccttgacatgggagcatgaagccagcaggaaaagtaccccaaagaaattgcagaaccagaaaaggcatttatgcaagaaacagaggtcagaggcatacagtgagaggagtccaccagccaagggagccactggcccagaggagcaaagtgacagcctcaaatcggttctgcacagcataagctttgtggtgagaaaggtgggtgtgtgttgcacaggtgtggcctccagccctcctccttgcattacatagctacagccttctccaggtctgatacagttcagttagagctgaaggtggtgatgggatgtctctaaccagagtccctgtatttttcccccagttttaaaactatgtacatgaacattggaggccccctctccaagtgtggagaagacggtggttatattcattctgatttgcagtacttctcttagagtcagttgcagttttgaatgaacagtccactccaggtggctaggcttgaactgactaggtttcataaatcttttttgatttgttctctttttgtgtgtgtgagacagggtcttactcttttgcccaggctggagtgcagtggtgcaatcagaactcactgcggcctcaaactcctgggctcaagtgatcctcctgcctcagcctcccaagtagctggtactacaagcatatatcaccatgcccggataattttttaaaattttttatttaccaggggaaagcgggataatttttaaattaaattttattttattttttgtagagatggggtcttgctatgtttcctaggccaggctcgaactcctggcctcaagtgattctcctgtcttggcctcctgggtcaagtgctgagattacaggcatgaaccactgctcctgtcctagatatgttcttaatttcacattggaatattatgatagatgataatgactgataattttgaacactactatttaccaggtacataataaactcacttaaccacttcaataaccaggcatcataactgcccctacttgatggttgaggagcctaaggcacaagagggttaaatagcttgcccaaggtcacatagctagcaagtggcagaggagggtttcatacccagggcacctggctgcagagtctgggctcttaaccaccggcaaaaactcctcttgtaaaaagcaaactgagataacaagcaacccagccaagggctaagccagccaagccagccagagtctgtttgttgttctctcccctcaagattgggggatggagatttcaggcaacgctgtgggtttagggaatgtttggcctcttcctgcatctcctgcatgcatctccttcttgctctgggaactcagcagcagactcccagggtggcagtgttgattttgctgcagagggctcaacattaatcttgtgcctggtattttaatctctcatcctgttgactcactctttccctgtgcaagcgctatagaaggagaggttcttatttattatgcaatgtcaagctcaatagctggtgtgagagtggtacctctcatagctaacaaagctgtctgccacgtattcattggaaacgatatttagttggctgagtgcaattgagctcagatttcagctaagtcccatgagtgccacctactttgccttctcgccactctccccgtggagcacctgacttccccccgccctgccttcccatgtgcctccaagaggcctccgtgaacttcccgtgttctaaggacgctgctttctggccacgcaatggctttgctaatgtgctattccatatgtcggtgactctggaattcctgcctcaaggatgcagtcaatgttttgtggaataaattgaagataaagtgggggcaatgcattgttgcctctggagcagtgggggcaatgcaatgcctctggagcctgagggaccccagttccaggcccagccacttcctagctgcttgaccttggatgtcttgctgaagctccctaagcctctgtttctttaccagcaccatgcatttcatagaagtacccatttcacaaggtggtgggggaactcagataccacataaaaatgctaagcccatagtaagtcttagctgatgttaggtatgattgttgcctttttctttaacaattatgtccagcttaagtgctgccctcaagtgttctacagggcatccaggtttttccaagtttagctcctcaattccatcagactggatcctccatggggtcagggttttttgttcacagttatgtcgttatcccgaagcccagctcctggcttggaggtggccagcagtgtttgttgggagaatcatcagaggatacaggcctcatggattttctgctaaagacaaggatgaatctagaaggcttcttacttggccccaagaagtggataggactcaaagggcagccaaatacctggtgaggctgcatcacatctgcggtctctttaatgccccggttcattgaagtccttttaggggaattaaatagattcagcttcatttcatgaggcaggaattccagagtcactgacatatggaatagccattagcaaagtcattgtgtggccagaaagtccttagaacacaggaagttcacggaggcctcttggaggcaaatgggaatgcagcatgggggaagtcaggtgctccaccgggagagtggcgagaaggcaaagtaggtggcactcagtgggacttaactgaaatctgaactcagttgcactcagccaaccaaatttacatccatgtgggctccacaaaggcagggagacctctgtgtggatcactattttatcccaaggtgcctgggattcagcaaagaccttgtttaaggaattattgatgacaggcagcgactctcatgtgctgagaatggcagacaggggatgggcgtttctggtctagcttggggtgggaaaaaagccatatttggccccatgttgggcatctttgccctaagggattgcagggagcaggcctacatgagaatgttctcagatgctccaagtgcagtattgcaatatctgcttgaacatgagtggacatgcttacacgtcagtctccacatgggctgtttgcctgcaatgattctccccagataccccatggcacccttcctcacctccttcacgtcttacccaaatgtcacctgtggcagatgttgtccctgcccatgtgccctggacctctaagtgtttcctggccatcttacaactgccttatctgcatccgtgcccaagggctctgcacacctccataaagaccttcacagactagagagcagccctcaaacaatgactgctggggcatcaataccccacctcctctgccattgggtgggacaaagctatagtcagttccccagagtttcctgcagtttccctgcagggttgagttccgtttgcctcctgtgtaggatattctgttagggagccaacccaataggctgccctttatgggccaccttccctttcctgtatcacttctcctcttccctactggaatttcctgcaccttccaaatgtgagtgtgactttcattcaaatccttgattcaaggtctgtttctgggaaaactcaagctaagacatctacctttccagtaaggctttccttgtacccccaagcctctagcccactccctgtcccttccctgtctcttccctgctttatttttctccatggcaagcatagatgtgcctgccccacatttcatttgcttgtcttgcttcctgtccatcttcccctgactacaaggtaagttctatgagggtagactcaggccattgcctgttgtgttcattgctgttcttgctggtggttggaacagtgcttggcacatagcaggctctgataatgatttgttggttgaattaataaatctggagctgtagaatgttagaatagtgtaacttctcagtaattccagatttttgaaaagcccctagatgtccatacttcaaaagctaccctagtccccctgggttgtacagccttttgcatcccattagatttgcttttctggagtctgggcacagaatagccttcctgttcaaggcctgtgtctcccagaccagcacaaggctgtttcacaccagtgatcttacgtgatttctagaagccctgtgggtgcttggctatgccacacaagggaaagcacttaattaagacttacattcctgcatcctcccaggctgtttatgtgggccagggtggtgtggctgcagctgccatgccccagagcctgcagtgaccccttgttctccgcctggcctgaccagcatagtttgggagtggcacctttgggccagaccctctaagaagtgggagagagtgactgtgtcccatctctgtttctctggcaggggaagatcttgggaatatgtgggaatgtgggaagtggaaagagctccctccttgcagctctcctaggacaggtaagctgtgtgatgagtgctgtgaagatggaacattaacatgacaatgaaatggctcccttccggtcaggcgtggacccagcagatggcctcggctgcactggacactgtgcatgtggttcacaataatttttgggaggttaatgcacgcagcagctccaggcccctgggccagatgaggctgagtttttcacaaactcttgagtttgccaatgaggaggtctattgaatggcattgcctccttgcctaaagctccatcttggtcaaaggagagatgggtccttaaacccatggttatccccatgagttgggctgccctgatttaaaaatgccagcaaggcagcttggtgtggaaggactttggagtctggagctcatggtgactatagatgtattttatgcctgaactaaagcagctcatgcccccaccttctctgcaaaccttggggtaggaagagggaggggacttgggtcattgtcccttccctgctccttctagttgggtgaccccagggaaaatggctaagccatttgtagttttcacaaacctctatgttgccacggtttctaagtcacatcccacatgaatgagaagctttgtggaaaaaaaatgctaagtcctctttctccccactctgctgttgctaaagagaagtttgtgcagctgggattgcctctttcaggaagaggtcggggtacttctgaagaagtggggactccagaatagggtggtggggggatgtgtcttatgagttttaatatgagtgacttcttttggcctcagttgactcatctatagaaagaatgacaactccttccctgcctggaggtggaggtgggggctgaattggatgagttcctgaggtcacccacgctctgagagtgtgtgcctccatgatgagtcagcgtgagccatagaggtgactcagctcaattccccacataatgatgtgaatactcttaatagcatcctactgcataagagatggcccaactgctcggatagctccagtgatgggaagctcatcatgtcacagccagttccttctttggagagttttgatgtatattggagtgaaatttgcctccttttaatttctgtcctttggaaattttgagataacattaagtctatctcccatgagacagtggtgggatcaggcccctggctgtggtcactggggaagcaggggggcactctggacagcctgggttccccagctgtttctgccacatgctcactatttagccttgggcaggtaacttaacctctctgagcctcatgaaaccacttggtttccttgtctgtaaaatgggactaaggagagttgtggtgaggtttgaatgagatcatgtaagcaatagttggctataggataatttgcaaggccagtcatggtgaaaaacattgaacatacatttaattcagttcacggaatataccctacacattaaaaatactacaattattattgttattatcatggtctcttctccaaattgaattctctgtccattgcacaactcctgaggtgaagtggcatcacatccttcggccgccttggtgactctccttctttgcccctggacccactgccactgccccgtgagcatcagccctgagcactgtggcctgccccacatgtaccctctgttgataactttgaacgttgcatccccgctgtctaccattgtctattggatgcccacgatgaggggtcatcttaaatgaacatatgtactcagggtcacaaactggagcccatgcatagttttaattgattgctgaatgctttaaaagtccaaagatgtcatataaaactggatctttgactcctctggacaaattagaaaatcctgctccatcaggcctgcatccttgcatggcaccaaagatgcaactgagtcaaggctgcttcctgaagatggggtgtgccaaggccaacacccacagccgtgcaggtggtgccctgctcccagggcctggctgagcagggttggatccagccagtgcacctggaggaaggggagcctcttgtgaagagtctgttcagagaacatcctgttgtagttgggcccaggtgccatgtgcactgggagcagccctgcagtccaagctctcccatttgtagcagagcttaccactgcctcttttcaagcattccctgcctggccctgtgcaggtgtttgactctgagattctgcatctgcatggttgggctttctggtgcatggacaagatgtcctgtcaacgcttttgtgccttcataaccaatgcttgtggaatatgtgggtgccagggtgcaatgggcatttgaggaaaagttctcaaggcttggctcctgaagcttctcccgtcttgttgttccagatgcagctgcagaaaggggtggtggcagtcaatggaactttggcctacgtttcacagcaggcatggatctttcatggaaatgtgagagaaaacatactctttggagaaaagtatgatcaccaaaggtaatattaacttttaaagcaggaggcacatttgtgtttggtacacactctcctacagatgctgatgctgttggtaatgactgctaagtgggttctgagtttaatgaattctgattaaacattcatcagatccacacagacactggttttcctcttcctgagccaagcgttcaggagaggcgacttctgcagacctgcgactgcacactgggaagaggatagaatcggcacttcattcccagggcagaggagcatatgttccgaggttctctgcaacagggcatatgtgggctgactagagaaaagtgaatccagcaattttgctttaggctgagtacccaaaactgctcagaatcatgagcaagtatgtaatgaatcacccctgacattattaattgacatcagagctatcaggatatattatcactgttagtgtcctcagaatggtctaactaaataaaaacaaagctcaacttataattacttgatttactttgagccatcatcttttttatatcattttattttttaaatggacataattacatttatctatggggtacacttttgtgttttgatatatgacgctgggggagaggggagtgtggggaaaggatagatgttgaccaaagggtacaaagtttcaattagacaggagaaataggcgttagtgatctattgcacagaatggtgacaatgataaattttaatgtattatatatttcaaaagtactgaaatagtatattgtaaatgttttcaacacgaaaattgcgagtatgtatttgtaataactgtagtatgtaatgaacagacagcaatttggggagaaatattttctctaagaacatttaataacccattagctgggcgcagtggctcacgcctgtaatcccagaactttgggagtccgaggcaggtggatcatgaggtcaggggtttgagaccagcctgaccaacatggtgaaaccctgtctctactaaaaatacaaaaattagctgggcgtggtggtgggcacctgtaatcccagctactcaggaggctgaggcaggagaattgcttgaacccgggaggtggaggttgcagtgacccgagatcatgccactgcactccagcctgggcaaaagagcgagactccttctcaaaaaaaaaaaaaaacaaaaaactcattaataccgtgatcaccgtggacatttctatagttattctctccctacttctgaaatgtttgagttttctaaattttaattttaacattagattcagggggtacagttttgttacaggggtatatagtgtgatgctgaggtttgggtttctactgatcctgttcactctctgttggacatagtacccaataggaagctgttcatccgtgcgccctctcatcctccatccttttggaattcccactgcctcttgttgccatctttatgtctgtgcatacccaaggtttagctcccatgtataaatgagaacatgtgatatttggttttctgtttctgtgtgaatttacttaagataatgaagtccagctgcctcatgttgctacatgattttgttcttttttacggctgcatagtattctatggtgtatatataccacattttctttatccaattcaccattgattggaccatcatctttaagctctggaaagtaatggcttcctatggttctttgcttagcttggtgtattgccacgtacattctctcatttgagtcccttaaccacccatttagagagattgtggcattatatccccattttacagataaataaaagggcctagagaggcgagttgaccctcccaaggtattaaatgctattaaatgtcagagttgagtcttggacttagacgttgagctccagatcaacatcagttttctggagctggaggtgcctgacagctgggtcactcagaaaccttcccaggcatcacaatgcttaattaagagaactggagttggttttaggaatctggctgtcagctctccagtggtagtttggcctttctcatcttacccaccaactctgtccctgctggctggtatggcagcatgtatgttctcatcaagaggcttgtcaattcacctcctcttccccggccatgccgtcctgtggccaggaggctcaggtgtggcaggaaggtgatcagtgcaggagtcagtgatcagtatagccaaattactctgctcagcatctcttggcctgtgccacccacctggaatgccttctctgtctgtggatgcggactggacagagggttgccttattcatcaaaatgatgttcagagggcaaatatgtgccaaatgcctgcagcatgcagggcacatggggaaagagatggctcaggtgtatctttgcccttaagatgctcaagtctggaatgggctataagaaatgcacagaaatgacagtgcaccagggaggaatgagccaggtggcagtagaccgtgctcggattgttccaaggcagcagagatcacgagaggatggtggatcagggaagagaagatggcacttgaattgggctttgaaagatggatctagcatccttcatatgtggcatatttagcagagattttgctcctagggcagaaactgtggctctcagggccataggaagcaggagggtgggaggaaattgaaggtgggaggtgttgaggggaggaagatgtgctgcgcagtctgagtcagattggcaaatgtagtaatagcaattatagcccccactgatggagaatttgccatgcagcagacactgtgctaatggcttcacatgtttttctgctccattctcacaacaacccaatgagaattagttgtttgcacaattttatagagcagagagtgaggatcagggaggtacagtcacttgtccaaggtcgcccagctggattcaaaccattctctgattccaaggcccctcatcataactgctatgtacaccaaccccaaagtttgtgtgtgggcatgatgcttgggctgtgcccaggttctgttttggggcctgtgtgcaaccggaagggcagctgctcatgcctgccactctctttcttgcctctttattgggaaggtctgtcttttgatgtctgagttgtgaggcctgcccattgttactcgctgaaggaaagagggtcctgatgacgataatgccaatgatatcaatcaatcaattctgtcatcaaccaaccaatcagccactgtggaggcaggcaacctgctgagcaggacagaaacctaaaggcccagtggtgctgctcagcagctgctgggagggagcacaaacctgagccaggcactgcaggcatcctgagcaggagttgggtccccaaggcggctgtgcgggggctctgtgatgcctggggaaggttctgcttatggtgggggctgtatgagtgaggttgagttgcagagaaaaccgagggaggagggtgtgggcatctgtcataacatggggacgacatcccagtgaccacggacgttcctaggttcctcggtgccagaaggccccaaaggcctcccctggggcagagcggggtcatgcccctggggaccgctgtggggctgaccccacagctttgctgctttttgcaggatagggcgctagtcctggcggcttggctgccgcagagctggctagggcctcggctgtcaaactccccaaagcctgggctgcagggctaggcagagcgtgacgctgagggggcacagtggagaggccaagaggcccaaagagcaggagtcccactctctctcccattccgccccctcacctcaggtgccattcccttcgactcagtatcccgagttgttgcaggggagaaaactccattctctccaacctactagcagtgaggggtggatggagtagctttgtggaggggctgggcaaatgtcaaggtcgtcactggtgatcacccagccccctgctgttagcctccttcacacacaccctctcttccacccacggtcctgcttcagccctgtgacccccaggaggccatccccagtaactgcagcccccaagggtgacccctcctctgactcccatgagcgtccagcaggtggcgccctcagtgtttcctgcagggctttcctgttcagcgttgtcttcttccctgcttggcgaaaaccctgccagggaaggggccattcctgaatcaactctgcatcaggtcaggggaggggccagtggtcactgggacgctacccttgggtcattgaaggcagagcgactggccagggagccttggacatagcagccgccacccctggccttgccccagcaacaccagcagcgcctgtggaagcagcccagggcagcagtgcttggggtctttctcacccagctacttctgagctttgcaccaacaggtatcagcacacagtccgcgtctgtggcctccagaaggacctgagcaacctcccctatggagacctgactgaggtgagcggggctgggagcgcaagcccactgtagctgcacacagtacatttgctcaggtccaaagggctgaggccagcaagcccctgttccacatccagatgccccaaggacgtgtgggcaaagctcaggttccacccattctgaattcttcctctggatctatacttgctggatgtcatagtggacgtggcaccaagcttactggtgtttggcacagtgtagtcacttcttggggctactcccaatctgcctgtcgtctcaggaagggtttctggtgaaaactgcttcctcatcccaagggctggctctgtcctgcaaaccagggccccttcttgcctcactggctctgcccaggccaggagtatgggggtcacctctaaacattgccccctggggtgcttgtccaaacgggctgagcctgccaccccatcctgggctgagcctgccaccccaagagacccaggggagtcaccttgccatctcgggtccccacccttcttgtgctctctgcacaatcttcctcaccttgcccaggagccccagaggagatcagaaggctaaagctttctgaggaaaggcagtttggggtgtctttctctactggtgccctcagtctgcatccccaaggaagtggccgtgaagccttcctggcctgcatctgagacctcccacactgcagccctggttcacccttccaggccatgctcctacctgcctgccaaagtgtccactcacttcctagcctctaagtctctgctcctgtgacatcactatcctttgagtttcaacccaaaatctgcctcctcaaggaaggctttcccaagtcccaccacctgaataatttgccacaaagtactctattgatgctcttcagcaggcgcttgtgaaattctgcttgctgctgctattatgtacataactaccctgcccaccgtggagctccccagggagaggggacttctcttgtccagcttgtgtgtcccgccccgtgcctaactcaacatctggctgaacacctggggttcactttgggttccattggatagaatcacctacagcaagcaatcatcctttccataaatatttactgagcacctattctgtgcccagcatggtgccaggccttagggtggtgatgatgaaccaggaagtcaaggcttatctctccacagtgcttagagttgcctagggatgggatagttgctctacaagtaaacaaaatagggaactcgcttttccatctgcacccagccacgtttccctctggttcactgctgcattctccccagctctctgctcacacaattccctttggtgataaaaatgacgtagcccctccctgtgggatctgcattgggctggggtcttgtgagatgggcacccctcaatcctcatgggaaagagctttgccctcgttgccgctgcccactgggcttcctggagaggtagacaagtggagcacttccactcaccacagagtctcgtgtgaccgggggccctgtaaggggcggaggaacttggatatggcgaggatcagtgtgtacgtctttcccctgagtcctgagaagctccaggaagcttccattgcccaagaacttcagggtgggctgacaatgggcagtagcattgtccctgtccacagattggggagcggggcctcaacctctctggggggcagaggcagaggattagcctggcccgcgctgtctactccgaccgtcagctctacctgctggacgaccccctgtcggccgtggacgcccacgtggggaagcacgtctttgaggagtgcattaagaagacgctcaggggaaagacagtcgtcctggtgacccaccagctacaggtgatgggacatgcaggatccaggaggtcacgggatgggtgtggctggggatctgatgctcacagagcctcctcttctgcctatatctgcctgtcttcagctgggaatgtggggagggagccagggatgcaagagacactcatgattccccagccttcctggctcccaggaggcccacctcttccactccatgcatggcctcagtggggccaagacttttcctgcaccagagggtagattctctagaagcaattgagtcctgcctgtgggtggattggggcacccttccccaagttctgggcgcctggtaagatggggagccagggaaaacaatgacggccccacccttactccagcaattctgggcaagcctgaggccagggataccttgactgggggtgtcagggggtggtagacctcttggatgaggggcccagatgccccaggtatcacaccccaggggaaaggggcttgaagccaggactttgggactaaggctgaggctttggggaagctctctctgctcagggccactgtctcaggctaaggagcatgaatctcactgaagaaagcgactgggcttgacctcagtgaatttaagaatttggcagagtgggaacagccctcactgcattggtctcacataaggcgtcctgattgcctgatgggaatccaagaacctcctcctcccaggccaggtttccctgcttccagaccatctccctctctcttctttgtagggaatccccagagatgtgtgggggaagggggggcagtgcatgtgtgtgcacgtgtgtgttcatgcgtgcacgtgggtgtctccttgcccgacgagagattccttgggattgacttatgttgaaaggcctattggagcaggagagcaagtgtcccgtcttctttactctcctgctacctgcagagaacatgttacataagggcctggtctgggggcaggaagcaggtctttgcaaaggtaagtcaagctggggtggagagggaggggcaatagcagcaaataaagttgccatggctataggatgctgcagccagcattttaggaccctccagtagtggccaggaggaccagcctaaagagggtgttcctcgaagaccctgtaaaaccaagctttcccattgctgtgatgctgcccctagcctgagctcacctttgcccagggctagagttctggtcccggaataagctccaggcatccgaattttgcgcatggggattgtctggatttcctctgagtgggcctgagcacctccaggaagcatcatgctgggctggtgtgggcaagagctcctagttcttcttctggcctagttcttcttctgagttaggatggaggacaaggttggatttcttcaagaccctcatgaggtgacagaatgggctctggcccagtctggatgctaaacctggcagccctagctctgcacctggaatatccctggagacaccctgcagcagggagggctgtcctccaagggctctggggatctggagggggatgcctcatccctgacagatgtgggtcatggctgtccctccaggagtcctcatgaggggaatcataaccttggtcctggttcggtctttgaaactgactgagccgcagtatgacctcaggcaggagccatcttcacaccaggtccatctccttagattccaccttcccgtgtcattttatccaactttttgcaagttggaagaggcaggtagccaccaggtggcacaagatcttggtcctgctgtgccttgtcagggagaatggaacttagagccccagaactgcggcccggggcttttccagagcctatcccctctgctcttactcccaggcccacaggcaagcatcttagtggttggggtggatgatcgctcttctaaggaaaccactgaaatccaacccaggtgcagatttggtgacggcttgcagaacaaagctgctcaaatctgcctcatatctctggagtgaactgggggcttgctgaccagagggggcttccccgggagctcctggagctggagcgtgtgctgtggctatgggactggaacaggcttatggtgtctcagtttccccatctgaaaaatcagctgataagacagggagctgggcagttagtgggagggaggcatgagggctggagctgtccaagctgttagaactgttatcattcagcctttgggcaccctcccaactcgcccaatcaagtgtacaatgaccgaacacagctacttctttcaggcttgtaatcaagagcagcagaggttgatttgaccttggatgaaccgtgcagtatcagggaagacctctggcccatactgcaaaggcttctttcggtcaaaccatctttagtctcagcatcttgcccacctctaggagggagcttccttgatcctggggggagagctctgtgtctcattccaaaatgaaaggaaaaccctcttagcagaactctttgatctcaggaatgatatggaaatgaagggaattcaaattaaaaaaaacagaagtgctttgggcaaaatgtgggatgccagcattaaatgtagctgtgtttttatctcatagataaagctggcataaattcctcaggccagggaatgtggcctcttgcctggagaccacaccgtggtctgcttctcctgggctaaatggggatgatgagggaggcttgtaattttagaacacaggaggaccttcgtgaagatcatatttcccctccctaccaagtcctggctgctgtgactgtcagttttattttccaaatctccatgatcagatttcgatttatttatttaatttttttgagacagagtcttgctctgtcatccaggctggagtgcagtggcaccttcttggctcactgcaacctccacctcctgagttcaagcgattctcctgcctcaacctcctgagtagctggattataggtgcacgccaccatacccagctactttttgtatttttagtagagatggggtttcaccatgttggccaggtgggtctcgaactcctgaccttaggtgatccacccgcttcagcctcccaaagtgccgggactacaggtgtgagccactgcgcctggccatgatcagatttcttaggaaggcagctcatttaaggagcagtagcaaaggaagattcagtgttctttactgtgagagccaaaggctggcttttttttggactcatgagacctgtgggtactagatgaatggttctgtgctgggggccaatctgcccccaggaggcacttggcaatgtctggagacatcattgcttgtcacacctccaggagggggtgctaccgacatctagtggggtagaggccagggagggtggtaaatatcctacaatgcacaggacagccccctcaaacaaagaatgatctggcccctaaagtcaacagtggtaactaaggttggagaggagtttggcatgggctctcctttccaggcagaagttcattgtcgatcacttacttctgcagttcttagagtcttgtgatgaagttattttattagaagatggagagatttgtgaaaagggaacccacaaggagttaatggaggagagagggcgctatgcaaaactgattcacaacctgcgaggattgcagttcaaggtaactcacacctgggcaggtgtgggaacaattggggcggaatccctcaggatttcgtgcctgggagaggtcctgtcacttagcattcagaaggaatttcattttgtctccaggatcctgaacacctttacaatgcagcaatggtggaagccttcaaggagagccctgctgagagagaggaagatgctggtataatcggttagaatcccatccctgttattgtccttggcttgaatggacacagatctctctttatttctcaccctagttttggctccaggaaatgagaaagatgaaggaaaagaatctgaaacaggctcagaatttgtagacacaaaaggtatttaccacacatcccctcagtcacatacacttaaggatgtattgggcatctaccgtttgggatacagacagtgtagacactgtgcatgtcattttgggcagccagaattggatggtctagggtactgtgtgccttggggttccactgcctaagtccaaattttggctccaccacttactagttttgtgaccttgagcaagatacttggccactctgaaccttagcctcctaatctataaaatgaggaagtagtaccaaccacaatttcttgtaaagattaaatgagaaaatgaacataaaatgattcgcacactgcctgacacacagtgatgctcaatagttattatgagctggagagatcaaagtactgcatggggattcgttagaggcaaaggcagacacggagcttcccactctttatggggagcattgagaacggattatgaagcagtgaagggattgaggtgggataaggttattattctttcaacaaataaaggttaagcattgactgtgtgcctagtagtactaaactgggctgaggagagtaagaagagatgcccgtgttctcaggatcttgtggtctggaggggactcaggcagatgggtaactatgggaaaccagtaagagtaatggggaatttgggtgagagagacaaacacgtcagggaggccttcacagagggggtggccttcggactggtccttcaaggttgtataggagtttgctggggacactgtggtgagaaggtgggagagggtagagggcttgaggttgagggtaggaggagattccagggaggtggggagacgagatgtggaagatgagcctggtgggggctacctggtcaggccacctcttctcctccatagacaccctgccttcattcactccacatccctagagcacctactctgccccttgccccatgctggacacagagaggactgaggtcaatagtcctcaaagtatacacagcaaggtggctttccaagttattctgttcctcaataatgcatagccaaaaaaaaaacttcgcacatttcatcaaatttaagatgccatccatttttaaaggctaccaccattttacctaccacttggaaagaaaaaaaaatctctgctaactaaacgatatgacatactagcaaatggaaggcacatccagattccagagatgttacaatgtgggggaaagaagtgagccttcgaatcgatgagatctggcatcctcaatggtgcttgtgacaaatgcacgcacatttggaaaggcaacatagttttacagttccagaggcttccagggctgaagtacccagatatctcttctgtgctttttggagaaaccttcaggctgcccgggatttggggtcccgtggagagagtaatctctgctcctcacttcctcatcactcacccctctctggagaggaaagtgtaattgtgaaatttcatgctggagagagacctagtcctcaaggataaacaacggggctgtcaagggcggtgaaagctggaggaagggaagactcgtgaactggttaaagacaacactgcccacctgcctggcatcacagcatcttctaaggcacagccgaggcaaacagagcatcagcggcactcctgccccagcctgcgggctgcgagggaatgtgaccagtcccttttgtgctcctggatgctgttcattaggctctgctcacacgctgaggcgtctccctcattttgcagtttcagagggagacacaatgggctgaagtcaggctgaacattttcaaaggagctccaggttcccaggcagcgagtataatggtggctctattcagcaaggtgcctttgaggcgtgaaagcttttcctgttgggccagagtgcacagtctgtatgtggggtgccccctcttctaactctatttatctctgtttataaaagccaagtacggtgtataattctgctttggagtcgacattttcgcatttctctgtggaggagcggaagagacatgcattcagtactggctgctaggagctgctttatccagcatcccttttcctccaaaatcttgtttccatgagaacttgacagtcattttcccttccccttggggaatggaagaacctgggacagacattgagggaatcaggtgtccatgcagcagctgacctagggggatacgctggttttcttctgtatggcatgagctctgagaacacaggacctgcctctttcttgctcactctgtagcagatgacaagggtgcctttaccacttcagcatgcccagccccctcccaaatgccatctctgcattcctttgcctgggggctctttctgggagatgccagctaatgtcaagctggaagtacgggaattaacacccccatccagggagcggccttcaccccaaggccaataggaatcagtacagaaaaatcccagatccctctcatcacgtgaaaaagccctgagtgtgtgcctacactggttctgagatttttcacatgggatgaagccccagtggcccacagtggtcgccagcttggtgacacaccttactccctttagctcccaaataaacctcatgtattcatagtctcttcttgggtgctgcttctaggagaaatacaccaagacaatccttgcatcctcaggactgaccatatagtaggtgcttaataaatatttctcaagagaccagaagcttacttcacagggctgtactgaagaccgagtagcacaaaatgagcaaaagtgtgttggaagtgcatttgagagcatgggacgagtggaaggatgcatcacagcccccttagccgtgttgtggagtctgtggaggggccgtgcctacctcgctgggcccccaccccagtggtgagagccatggcacttgtgtttgtctccacagttcctgagcaccagctcatccagactgaatccccccaggaaggaaccgtgacctggaaaacatatcacacgtacattaaggcttctggaggttcagtataaaacaacaagtttcttgatttaatttgcattttaaaaatcctgtcttaaactgttgggttcacgttttatgatttctttaacaattattctgtttatgctagggccatttatcaatgcttttattttttcccctcctaaaaactaacgtctgataatacagccttttaaatggaatcattctttatctccattaaagctgccagactctcttttattggagtggagtgagcagcagcatgaaccctacccttgcactccagttgctctgtacagcagtggccagtccattgccagccttccataaaagatgctcatctcagtgtgcaaaacatgcctgtagtttcactctctgtctctctccagcaagactgggttttccttggtttctttttctttctttctttctttccttttttttttgaaatggagtcttgctctgtcacccaggctggagtgcaatggtgcaatctcggctgactgcaacctccaacctctgcctcccaggttcaagcaattctcctgcctcagcctcccaagtagctgggattacaggcacccgccactatgcctggctaattttcctatttttagtagagacgaggtttcaccatgttggccaggctagtctcgaactcctgacctcaggtgatccgcctgcctcagcttcccaaagtgctgggattacaggcgtgaaccaccatgcccgaccttccttggcttcttttaaaagaatattgagtcacttctattgaagtgcacattggtggtttttccaatatgttcactgtttggagccattttccaaccaggtagaacagatgtccccacagttcagggtcccaacactcagatgtgctgcatcagtctagcaggtggtttccaggcgtgggagtccttttcctgcaggttttgaatttcccatcagggttgggtcctgaggaaggtcagcccctgccatgtgctcatgtctgcagccccttgggcctctccgctcctcttgcagggtacctcctttctctcttcactgtgttcctcttcctcctgatgattggcagcgctgccttcagcaactggtggctgggtctctggttggacaagggctcacgggtgagtttccctttggcattggaagatgccgagtctgtgtcttggagtaaaactctgctgccagagcatctgactgcccctgccaccatgccatgagcccacatgcatccctctgcccttttcaagaagtgggagtcagatgcttacaccacaggacccaaacccctggaatcccctttgatttttcaagacaagcagggtatagacaccactttcagattttaaagggttgactaaagaagactgtgccccagcttgtctggaatcaggcacgtacaagattgggtcagtttcac

SEQ ID NO: 1878 - protein, 570 aa, Homo sapiens
MLLFFHHRFRVLWDEEVARVGPEKASLSHVVWKFQRTRVLMDIVANILCIIMAAIGPTVLIHQILQQTERTSGKVWVGIGLCIALFATEFTKVFFWALAWAINYRTAIRLKVALSTLVFENLVSFKTLTHISVGEVLNILSSDSYSLFEAALFCPLPATIPILMVFCAAYAFFILGPTALIGISVYVIFIPVQMFMAKLNSAFRRSAILVTDKRVQTMNEFLTCIRLIKMYAWEKSFTNTIQDIRRRERKLLEKAGFVQSGNSALAPIVSTIAIVLTLSCHILLRRKLTAPVMQLQKGVVAVNGTLAYVSQQAWIFHGNGRGQWSLGRYPWVIEGRATGQGALDIAAATPGLAPATPAAPVEAAQGSSAWGLSHPATSELCTNRYQHTVRVCGLQKDLSNLPYGDLTEIGERGLNLSGGQRQRISLARAVYSDRQLYLLDDPLSAVDAHVGKHVFEECIKKTLRGKTVVLVTHQLQDPEHLYNAAMVEAFKESPAEREEDAGIIGYLLSLFTVFLFLLMIGSAAFSNWWLGLWLDKGSRVSFPLALEDAESVSWSKTLLPEHLTAPATMP

SEQ ID NO: 1879 - DNA, 59588 bp, Homo sapiens
  source
  (1)..(59588)
  CDS (201)..(239)
  CDS (19765)..(20013)
  CDS (22071)..(22222)
  CDS (25670)..(25814)
  CDS (28077)..(28268)
  CDS (30114)..(30265)
  CDS (42934)..(43362)
  CDS (46385)..(46558)
  CDS (48143)..(48221)
  CDS (50255)..(50359)
  CDS (59242)..(59388)
gatggatggatggatgacaatccttactatactcttggttggatagtgatccatcattttggattttagggtgctcagcagaacatcttcaatccagccctcatttcgtcacaggagtgatgaccccgtgggcagtctttggggagagaatgattaccctgaaggcattgaaatggcatccatggagatggcaaactcatatggccactctctgccaggtgctcctggaagtggctatggtaagcatttgttaagccaggatcatatcctgggaaaaaactgaaatcactggatttaggggtgcaatcattaaggagacttggcaataggagaattggtgtatccttccaatctcagagacccttgtttttacatacaaaagttgagaattcagtgtttagagaagccaagttaattgtcatcaattataaaaaaaatgctaggtaagagttgtggaaaatggggacctgtgcactctgttcctaccagagttggtgaagctcagtccatggtggttatgtggcaatgtgggctcaatgtggcaagatcttcatatttttcagaagccgtgtatttggggttttatgtgaaacctgatgttgatctgttccaaaataatttttaaaagtaaaaacagtgagctgggcaaacaaaaccacattttttgttagctgccagtggccacctgtagtttagcatatcctaaaggcattcaggcaatcagcacgtatgtgttcagaacctactgggggaaaagggagttaagaggtagctctgccctcatgttatttaaagcctaaataggtcaacaaaagtgccacatcaagactaaagaaaaggctgggtgtggtggctcacgcctgtaatcccagcacttgggaggtcgaggcgggcagatcacctgaggtcaggagttcgagaccagcctggccaacatggtgaaaccccgtctctactaaaaatacaaaaattagccaggcatagtggagggcacctgtaatgccatactcgggaggctaaggcagaagaatcacttgaacccaggaggcggaggttgcagtgagccaagatcgcaccactgtactccagcctgggcagtagagcgagactctgttaaaaacaaacaaaaaaaagactaaagaaagttagcaagcaaactattaatatttgaaaaatcatgttgtcctcataatttgttgtgtgtatagataagatgcttagctccaggaggcaaaggaaattctaaacagttttttttttttttaagacagtgtcctgctctgtcacccaggctgatcatagctcactgcagcctcaaactcctaggctcaagcaatcctcccacctcagcctacccagtagcagggactacagttgcatgccaccatgcctggcactttttttatgcttgagaaagatggggtcttgctatgttgcctgggctggccttgaactcctggcttcaagcaatcctccagtctcggcctcccaaagtgctgggattacaggcttgagcctgggccaattctgaacagttcttactttctaggaggaaaaagagacatgttccaggaagccgtttgatggcacaagagaaaaaaaaaatccaggccatgttaaaggaatttggaacctgtggaagtcagaaaagggagaaggtgttcagccaataagaagagaacaagagacccaagtgctgggaggtgcagatggaggattgatgagccttgaggagtagatggggcaggtctggaagaaggcagagaggaggggacaggatgcatagccatgtactaatgaaaacactgactgttaacacatagaaaattttcattccgggcctaattttaaaaattagctgggcgtggtggcacacacctggggtcccagctacttgggagattgacacaggaggatcacttgagcctgggaggttgaggctgccgtgagccatgactgtaccactgcactctggcctgagtgacaaagcgagaccctgtcgcaaaaaaagaaaggaccggacaggacaggacaggaaaggaagggagtggaggggaggggaagggaggggaagagttggggggaggtggagggggagagagggaaggaaggaaggaagggaggaaggaaggaaaaagaaaagagaatattcctttgggagcacagacatcagatagcccagggctattccaaacctttattccaagcattcctccacaggggcaatagaaatcccaaggggggaatatctgctcttgaaaggccagaaaaaaatctcactcttgatgtataaagcagggatacacatgtagtacacaaacggatacagtatatctttggtattaaaacttcttagaggacggcaatgaggaaaaaatgtctcccctgcttaaggggctgataatgaaacaagattgagacatactgtgctactccagtgcaagtggaacgtataactgcaagcaaatcttgagtgtttcctatgccctggagtctctgtccagcacttgacttttattatctcatttaatctgtacaactgcctttcaggcaggcactgccactctccctgttttaacagatgggaaaactaagacttagaaagaaatatgcacaaggtcactcacttactaaattgacagagccaggattgaatcccgtctctctacccaaaacctgacctcttatttaccctgcattactgctaggttgaatcagggcaaatacaaacagattcctgaccacaaagctctatagaacattggaagataaaatacttaaaaaacaaaaaaagcaggtcagtatagctcacttctctgggatcttttgtagggcaaagtttgcagcccttggcaatcacttgtccagtgtcaccccatcctgataaagtgttcactccttaaggagaacctgtattcatctatgtaccctccaaggctctaggtgctcttcctagtgtcacagtgcctggcccacagtaggtgcctgaaaaatattaactgagttaataacaacaacaacaacaacaactataagagttgtatcagctagctattgccacaggaatgctgcataacaaacaactccaaaaatccagagtcgtacaataaacaagcattttcttcttacgggtctgcaaggttggttggcatttggctgaactacgctgagtttgttgtgcttggctctacgtcatgggttctatttagttctagtgtccctcttcttggaccagtgagtgacctagggcaatgtcttcccatgccgtaagctgaaagtgctcaaaatggcaagcagaaacacacggtatctttaaaagccttggcttggaactggcacactgtcacttctgtcatattccattgttcaaagcaagtcacacgactaagcccaatatcaatggaggtagtcaaggtaggggaaatgtaatatttgctgaataacaattaatctactataacagttaatatatattagagtttaatatgttcgaggattatttaatcatttcacatgtgttcactgattcaattcccacaacaatcctatgtgaaggtcctattattatccctatttatttatttatttttcagacaaaatgcccgctctttagtgcaggctggagtgcagtggtgcaatctcagctcactgcagcctttacctcctgagtggctgggactacaggcacactactaccatgcccagccaatttttttattttttgtagagacagggttatgccatgttgcccaagctggtctcaaactcctgtgctcaagcgactgtcccactttggcctcccaaagtgccgaaattacaggcatacaccaccacacctagcctgttatccctattttagagactaagatattgaagctcagagatgctaagacacacacccagggggcgcacaactaggaagtaacagggctgggagttgattcccaggcaagaagctccagaaggtcttgcaatgtaattttgcatattgtccccattaaaatgtgctccattttctccatttctcccagctaattgggaggctgaggctggagaatcacttgaacccgggaggcagaggttgcagtgagccgagattgcgtcactgcactccagcctgtgtgacagagcaagtctcaaaaaaaaaaaaaaaaaagagtggactagagtaaggctatgttagagtgcagtttatatagtcaaacaaagtattattttgtaaaacttgcttttcagttctatatgtataggtgtgtcctggatctcagtgcaaccattatttacacacacacgcacacacacacacacacacacacttttttactgggctccatgactcaagcctgtaatcccaaccctttgagaggccaaggctggcagattgtttgagccgcccagaagttcgagaccagcctggataacatggtgaaaccccctctctacaaaaaatacaaaatattagccaggcatggtggtgcatgcttgtagtcccagctactcaggaggctgagatggaaggattgcttgagcctgggaggtcaaagctgcagtgagctgaaatcgcaccactgcactccagcctaggtgacagagtgagaacctgtcttaaaatatatattaatatatatatttaatgtaattttttatattatattttatattaaaatatatatttatagataatatatatattttaatatattatatttatttttatattatataacatataaaatatagattacatgtaacatataaaaataaatatattagaaatacaaaaaatatataaaatatatagtataaaatatatatttatttttatatcatgtagtttatatgtatttttttcttttttttttttttttgagtcagagtctcgctctgttgcccaagctggtgtgcagtggcgcgatctcggctcactgcaagctccacctcctgggttcatgccattctgccccagcctcccgagtagctgggactacaggcgcccgccactacacccggctaatttttttgtatttttttagtagggacggggttagccaggatggtctcgatctcctgacctcgtgatccacctgtctcggcctcccaaagtgctgggattacaggcgtgagccactgtgcccggccacatatacatatatttttagagacagggtctcattatgttgcccaggatggtcttgaacttttgggctcaagtaatcctcccaccatggcttcccaaagcactgggattacaggcgtgagctacctcaccttgccaacaattatttttaactatggcttagtcaaatgaaaaaccattgatctaggctgattatatttaacagcactgtttttgtatttttgtcctagtttccacccaagttcttaatcagtagtctgttagaacctcaaagaccaggtctcagtcttattagccgttacgaaccactattagcacatcataactattgcatgccaggaatgtctagtgtggtgagactaatcggcaatatctccttcctcttccctccagtgaaccctgcttatgtaggtgaaagtggtcctgtccatgcttatggaaacccaccattgtctgaatgtgattggcacaagtcaccccaaggtaagtgatatggtttggctctgtgtccccacccaactctcatttcaaattgtaatccccatgtgtcgggggagagacctggtgggaggtgattggatcatgggggtggtttcccccatgctgttctcatgatattgagggagttcccttgaaatctgatggtttaaaagtgacagcttcccctgcacccactctctctcctgcccccatgtaagatgtgcccttctttcccctatgccttccaccacgtttgtaagtttcctgagaaatgccccccagccatgaggaactgtaagacaattaaacctcttttgtctataaattatgcagtctcaggcagtatttttatagcagtgtgaaaacagactaatacagtaagacttaaaggacagtgaccaaaaagtcaaccctggagaaggaacatgtccaagacaatccacccattgccatttcctttgacctccagtgtggttactgatgcagaacctgcttaacatatcataatggagttttcttttagatgtatagtttgttgtcttctggggatcagggtgtcttcattaggaatcttctggttgcaagtgacagaaacccaactcaaacaggcattagcccagggggaattcattggctcatgtggtagaagcgtatgggggaaacttaaagaaatgaaagtagaagtattagtaccttccagcacctagtacagtgcctggcacgtagtaggtattttagggatatttgttagattaatttgttgaatgagtacagaaatcaggacctcagtctgaggtcagggaactcaatgtcacctggactctggtttcccatccatttctcatctttgtaaaacttgcttttcagttctgtatgtataggtatgtcctggatcctcagcacctctttaagttagacctcattcatctccgtcagagtcaggacttgtccacaggccagagaacacggccaatagcaggcccacgtgagccctctgcttagccacctcattaggaagtcttgcttcctccctgggtccatctctaatgcgggggaaggactctggccagtctaactggagcacatgcctacacttgagccaatcatttttaccacaagggacaagactgggtcacctgtctattctgtggctaatgcctgtgttggtggggacaagatgcattgatcaaagtttttgtgaatattcatataattattatgataatggagtgtggaagcagtcagactggtgaaagatagaaggcgctgcaatcagttaggaagctctctaaggatcactgtgtgtggtgatgaaggttgaatcagaggcagagactgaaaaataaaaaggaagcaacaagccaggcacgggggttatgcctgtaatcccaacactttgggagaccgaggcggtaggattgcttgagcctgggaggttgaggctgcagtgagctgtgatcacgccattgcagtctagcctaggtgacagagtgagaccctgtctcaaaatcaaacaaacaaaaacaaaaaatgaagcaacagaggagagagactagactagggagtgctggagccacaaggcaaatctgtgagcaacaaggaataaagtaatgaggtcctctatacaatgatgcgtgtggagagaagccacttagaactctcacctttcagccccatcgcctataagataaccgttagcctcatccttcaagagatgtatgccttttcagggagggttagatattgctacttggaagggaaaaccgttgggatataaatgatcacactgtctatttggtccccactggggcacagaatggctttaattatcagggagaataaatatgtttaaatgttatgactgctctgtcttgccagcatgaggtttggagactgtatagaaaaaaacacactcagagtgttttttctgttctcttactcaacaaccatcaacacagaaggcttctgtgaacaaatgggtgggggtttctccccacacaccaagaaagcgatcaattttacagcagacatcgctgggtatcctccaattcaattctgacactatctacctggagatagtgtcagatcccataggacaaaggcgcagtccccaagactatatacctccttcagaccccagccacatgtccaggccgccggaactttttctttttattattattattatttttaaggatctcactccgttattcaggctggagtgcagtggcaccatctcagctcactgcaacatccgcctcccaggttcaagcgattcttgtgcctcagcctcctgagtagctggcattacaggcatgcgccaccacacccagctcatttttgtatttttagtagagacggggtttcggcattttggccaggctggtctcaaactcctgacctcaactgatctgcccacctcggcttcccaaagtgctgggattacaggcatgagccaccgcacccagccccagaacttctgaccaaccagcttcaagttggggttcccacgacctcctcctttggtttggttaatttgctggagcagctcacagaacttcgggaaacttatgtttactggcttattacaaagaatattacaagggacatagatgaagagatgcattaggtgaggtataggggaagggacacagagcttccatgccctccctgggtgagccaccctccaggaacctccccgtcttcagctatcagaaagctacctgaacccagtcctcttgggccttttattgggaggcttcattacatagacatgattgacaagcatgtagaaatgagactggatggccgggcatggtggctctcacctgcaatcccagcactttgggaggccgaggcaggtggatcacctaaggtcaggagttcgataccagcctggccaacatggtgaaaccccgtctctactaaaaatacaaaaattagccgggcatggtggcatgtgcctgtagtcccagctacttgggaggctgaggcaggggaatcacttgaactcaggaggcggagaatgcagtgagccgagatcaaagggtgtatgatctcatactaatagacaggttggggaaacccagaaagctgtgtctgttcagatccttcttgggctttctgtgcagcattccttcctccagggtttggggcaggaccccttctgaaatgagggagaatttctttatggccaactccaagacagaaaggtggggaaagactggaatcctgccttggggagaaaatagagcaaatgaaaagaggcaggagatcagagagagagattctgttttctgaggcttaaaattctaacattataacaagggctatggtagttatgagccaggaaccacgggtgggaaaaaattatatatatatattatatatatatatatcacaggaaccctggtagaagaggagtccccaaaaggcagagagtagtaaagaaatagaggaccaaaagatgaacctggctgtcttcatcattttgctttgtgttgaatctgattcacaaaccacatgcaattaaataatagcccaggctgggtgcactggctcacacctgtaatcccaggacttctggaggctgaggcaggtagatcacttgagttcagaggtttaagaacagcctgagcaacacagtgaaaccccatctctatgaaaaatagaaaatttggccaagcatggtagctcatgcttgtaatcccagcactttgggaggcctaggcgggtggatcacttgaggtcaggagtttgagaccagcctgcccaacatggtgaaactccgtctctgctaaaaatacaaaagttagctgggcatggtggtacatgcctgtgatcccagctactcaggaggctcaggctggagaatcacttgaacccgggaggcggaggttgccgtgagctgagatcatgccactgcactccagcctgggcaacagaatgagactctgtctcaaaaaaaaaaaaaagaagaaaaaagaaaaattagccaggcctggtggcgtgcacctgcagtgccagctactctggaggctgagatgggaagatcccttgggcccaggaggcaggcactgcagtgagccaagatcaccctactgcactccagcctaggggacagagtgagaccttgcctaaaaaaggaaagaaagaaaaacaaaagatagcctgataaagtatagctttgatgaattaattatgctgtgtccctaggaagcacctgccacatagtgtgcgtgcttatattcattcatttatgaatgaatattttgagatggaatctcactatattgctccgactgttctcaaattcctgggctcaagcaatcctcccgcctcagcctcccaagtagctgagaatacaggtgtgagccaccacctcagttggcaagaatgaatgaatgatacaccagcatcttttttgttgttgtttttgaggcagagtttcactctgtcccccaggctggagtggagtggagtgacctcggctcactgcaacctctacctcctgagttcaagcaattctccagcctcagcctcccaagcagttgggattacaggcccctgccaccacacctggataatttttgtattttcagtagacagagtttcaccatgttggccaggctggtcttgaactcctggcctcaagtgatccacccaccttggcctcccaaagtgctgtgattagaggcataaaccaccacacctggcaagaatgaatgaatgatataccagcctcttgttacaggaaggggccagagtgaaatgactaagagttctgctttgggttcagagcaatccggatttgaccccagctctactgcttgctggttttgtgacaaattatttcatgaagcatcagttttcttagctataaaatggggttgattttaatatctacttcatagcgtaaatgttgtgctctatttaaagtacttggcctgcagtaatggcaggtatcattactgttaattatcactgttgggagaaggaatacatgggttctagttcaattttgacatttaatgaaagtgtgatgaggaggaacagtgtccgttcagctctctgcacctcaatttctacaactattaaataaacaactaggcctaggtgatttgaaattagatctattggataggaattgtgtttatgtgcctggcactggaacagaaatgtggcttagcaataaaggggtttatttttctcatgtactgagaagtgtgggttaggtgcaatggttcacacctgtaatcccagcactctgggaagccaaggtgggagaattgcttgaaaccaggggttcgagaccagcctggacaacaaagtgagaccctatgtctttaaaaaaaaacaaatagctgggcatggtggtgcccctgtggtcccagatactcaggaggctgaagcaggaggattacttgatcccaggaggtcaaggctgcagtgagttatgatcacactactgcactccagcctgggaaacagagcaagacctcatctctaaaaaaaaaagtttaaaaatttgtacttttttttacatgcggtggctcatgcctgtaatctcagcactttgggaggctgaggcaggcgaatcacttgaggtcaggagttcaaggccagcctggccaacatggtgaaacctcgtctctacaaaaaatacaaaaatttgccaggctactcaggaggctgaggcaggagaattgcctgaacccaggaggcaaaggctgcagtgagccaagatcatgccactgtactccagcctgggcaacagagagagactctgtctctaaataaataaataaataaaaatttttaaaaagcaaaaaaacaagaagcatggagggaggaagtgcaaagtttgtacagcagctccacccatgatgccctcaaggactgaagccccttctgcagcctttttctctaccatccttagcaggtgaacgttcgttctcttcttttcaaaatgtctggaggaagactggtgaagggcaaattgtgaacccaggcaaactgtccccttagaaagagcattcctggaagccacaagtctcattggctaaaactgagtcacaggcccacccttagccgcaaagaacactgggaaactttgagcactatgtctgcacaggaaatggagcttttgctggtgtgagaaagaagaagattagagactgagagccagacaaatagcagagtccactacctaaggcatcaggagataataattgtatcactgtaaacccatgtggatttctacaggcagataaaactacagatataaaatataagttcagccaggtgctgtgtctcacgcctgtaatcccagcactttgggaggccgaggcaggaggatcacgaggtcaggagatcgagaccatcctggctaacgtggtgaaaccccgtctctactaaaaatacaaaaaattagccgggcatggtggcgggcgcctgtaatcccagctacttgggaggctgaggcaggagaatggcgtgaacctgggaggtggaggttacagtgagctgagatcgcgccactgcactccagcctgggtgacatagcgagactccatctcaaaaaaaaaaatatatatatacacacatttagaatatatatatgtatatttagaacatatatatgtatatttagaacatatatatatgtatatatataagttctaggccagaggcactaaattataaaaaaaaatcttgccctttgactatgagtcatttagaaaaatatcttccttctgtttctagaatcccattgtcttaaatgaaagattctgttttcgatttcttgcctagctaccaagacagaattctctgcaggaaaacactccttctcctgagaaaactcctcaggggttagatgcagggagttatgttgtgatttgtgtaggggtggctttggtgagctcatcctggcattttaaaaataatgtgaatggtgtatccctttgtgatcatcatcactttttccctgcgagtcccaatcaatgcgggtgtgactgctgtatgaagtctcaggaagcccaccccagtggagaagaaggcttgcaggaggcaggagatgctgtccgatgaccacgtgaatgaaatcatcatacaggttgagaatgtttcctctggggtccaaagccacccatcctcaaatcagatttttcaagaaaaggtgctgctagactcaagcatcaacatggttttgtcaatatctgacattgatgtgatagactctcagacagtcagcaaaaggaatgaccaaaagggtaaccaggtgctgcggttttcaacatctttgaatgagtcgatgtctcagacccttcatagcctagaatgcatgggcatagacactcctggttcttcacatgaaactgttcaaggtagtgaaatgctggggaagagaagtaggggagtaggaaaaaaggcttcctcgttgtccacagcatattttactttttagatatcaagtggggccaggcgtggtggctcacacctataatcctacggctttgggaggccaagataagaggaacacttgagcccaggtgttcgagactagcctgggcaacaaagggagacctcattgctacaaaaaaatttaaaaaataataaccaggcatgatggtgcacacctgtggtcccagctactcaggaggctaaggtgggaagatcacttgagcctaggagttggaggctgcagcaagctctgatggcaccactgcaacccagcctgggtgacagagtaagatcctgtctctaaaagaaggacattgagtaatatggaagggcggaaggttttgtggttgaactaaggaagccaaggacaaaggaagggatcaatttaagacatccctaacaagagcttatttttatcaagcttattttgtatgccttgtgctctgcagagcacctgctttttgttatccatcgaatttttatgtactccctgcactccacacctttgaggtggcatttccgtttgcttgatgaggaaactgaagctcagataaatttagtgacctggaagatctggggcccaaatacaggtctatctgattcccaagactacattcttttttttttttttttttttttttttttttttttgagacaaagtcttgctgtcacccaggctggagtgtagaggcacaatcttggctcactgcaacctctgcttcccaggtttaagtgattctcatgcctcagcctgctgagtagctgggattacaggtgcatgtcaccacacccatctaatttttgtatttttagtagagatggggttttaccatgttggccaaccttgtctcgaactcctggcctcaggtgatctgcccaccttgacttcccaaagtgctgggatggattacgggtgtaagccaccacatccagcctcaagcctgcatccttaatcgctacactgtctcactttgggctaattcctcctcaccctggtcaggcaacagataggatgtctcttgttggcaagatcatcaggaaaccagatcttagctgagaccttccagcctctctgctcctgaggccaatggagatgctgtttcttttaatttaatttaatttaatgtatttatttgagacagagtttcactcttgttgcccaggctgaagtgcaatggcatgattttagctcactgcagcttctgcctcctgggttcaagcaattatcctgcctcagcctcctaagtagctgggattacaggcacctgacaccacgcctggctaatttttttgtatttttagtagagacagggtttcaccatgttggccaggctggtcttgaactcccgacctcaggtgatctgcctggcttggcctcccaaagtgctgggattacaggtgtgagccaccatgcccggcccagagatgctgtttctgtttcacccccacagtattccaggcataaagtcaagcagctctcaatgatttcagggagaagaaaaatatccctttactcacacaaagcatttagtaggtttagcccctttactgaagaagattggggcatcacctctcacactgctggctccctggatctctgtatattttcctcttccatctttcttcctctcaatctactcacccttcctacccaggaagaggcacaaattcctcatcctcagcagagagatttggtggtcctcttttgggaattccccttacacctcaagtatgtcattacgatgaacattgtatttcccggcgggccattctaaccctgtgctgtgaccaaggagccagcttgctccctctgtccctcagccaccctcggcacggtatcgctgccccgcctgctggcttctttgctacaggatagcaatagcacttctcacatcacatgcagacacaacaataatcagaggaagagacatctgtctttttcttgttttttgctttttttttttttgagaaggaagaaatattttccgagaaatttctcagcacacacctctcagaggacattggctaatgctgtgtcacatgcctgtgcttaaaccagtcacctgcaaggggacaggaccgtgaggattggttcactcagactaaaacttgctctttgggcctagagataggctccacctcaaggaagctcagggccatgtgagggaggcaggtagattcctaaacacaattggaattccattaacaaggaggaaatgaatttggggtagacaatagcatctgccacattgactgcaaatgtgaatatgagttagcaggagaaaaggagggtgtacttctaggaaggtggaagggcattcagcgatagtcaaggaatgtgagaagtctctcgaacctggggtcaggggcaaaaggaagtgatgtgggatattaaagcaagagagccaggcgtggtggctcacacctgtaatcctagcagtttgggaggctgaggtgagaaatctcttgaggtcagaagtttgagaccaccttgggcaacatagcaagaccccatctctacaaataataattttaaaaaattagctggttgtcgtggtgtgtgcctgtagtcccagctactctggaggctgaggtgggaggatcgcttgagcccaggagttcaagaccagcctgggcaatgtagtgagacctcagctttacaaaaaaataaaaaaattagccagacatggtggtgcattgtggtaatcacaacactttgggaggctgaggtgggaggatcgcttaagtccaggagatcagtgttgcagtgggctgtgattgtgccactgcactctagcctgggtgacacagcaagatcctgtctcaaaaaaaaaaaaaaaaaaaaatagaagaggtagggtgaccaaacacgcaggatcttattgactttgctaaatgttttttgttacaggaaagagaaaaacactgaattggaataaagtgcagccattattcatttgctctcactttgagctttaacacatatatgtgttttttttgttgttttcctttgtgatctttgagatccccaactccataaacttcttcccttgtgttacgtgctctgacttcagcaccacatttcagtgttacgattctgttaaagaaaaaagaaattaaattccattaatttctttcataggacagaagttaatcgcatcccttatacccatgacatccagagacagaattaaagccatcaggaaccagccaaggaccatggaagagaaaaggaaccttaggtatggactaaaggcttttcttctttctcagatttcatgcgaacctcaatcctctacttttgccccatctcaaaaagataagaaataaataagcacaatagaagagacaaatattcctgacagaaaaatttcaaatgccctctgtaggtactcctttctccaggggctacagcttaattcctgctcctgggctggagtgtgggctctgcttggtgagctgctttccaaagagtagggcgtggaaggaagagaggggtgtaactttccagtggagagtctgcctaatactgccttggccaagactcaaggttaacatccccaaagataagtcatgtgatgggggaaacatgtctcctctgtgctactctctcctaaaacccacaaccccagtctaaacagcgaaaaacattaggcaaatcccaactgaaggatattctacaaaatactcaaccagtaccccttgaaactgtcaaagtcatcaaaaacaaggaaagtctgagaaactatcatggagtggaaagttctacagagacgtgacaggctgggtgtggtggctcacgcctgtaatcccagcattttgggaggccaaggtggtgggattagttgagctcaggagttcgagaccagcatgggcatcatagtgagactccatctttacaaaaaatgaaaattaaaaaagagagacatgacaagtaaatgcaatgtggtatcctggacgagatcctggaatagaaaatggacatcggtggaaaaactggtaaaatctgaatagtctggagtttaggtaatagtaacgtaccagtactggtatcttagttttgataaacctaccatggaaatgtaaaatattaacggggaaactagcgagtggtatatggaagttttctttactgtctttgcaagtttactgtaaatctcaaactatgataaataaaatctttacttaaaaaataaagatcagactagtgcagtggctcatgcctgtaatcccagcactttcggaggcttaggcgggcagatcatgaggtcaggagtttgagaccagcctggccaacatggtgaaaccttgtctctactaaaaatacaaaacttagccgggtgtggtggcatgcgcctgtaatcccagctactggggaggctgagacaggagaatcgcttgaacctggaaggcagaggtttcagtgagccaagatcacaccactgcactccagcctgggtgacagagcaagactctgtatcggaaaaaaaaataaactaaaataaaaaagaaaaaatacataaagaccttaggagttttataagctcaggaattcaaaacccgagggtaagggctgttttagccttcagagtttacattaattgttgcttaatctttttttttctttttttcaatttgatatagttggcagaaagtagtagagtggatgcaacaacaattactagtaagtgattcatggatgtaggattttctgaggtttcaaagacaaatttcaaatcctggcagggtggaatagatttgtcaacaagtaaattacaaatggcagaaagtaaatcaggccaagtcaaaatagagattgcaatgggaggaccagaaaggtctgccctccctgactttgctggggaaaaatggagagagggggcatttgagctgggccttgaaagacaattgaccatgacattgggatgggccttcgaggtggaccaaagaaagctaggaaagaaccagaacaaagcagatgtggtgagttcatggaagggtaaggagaccaactgtgactgtgtctttctgaaaacacttccattttgaactctgtatggctgcctctgtcactgaatatgggctccaaagaccttatagcaagatttcttaatatcagtacaagtaacatctgagggctggatctttctctgttgtgggggctgttttgttcattgtagggtgtgtagcagcatctctgatctctatgtacttgatgccaatatcaccccctctccactccttagtttcacaaccagaaaagtttccagacattgccaattgtgtgggggcaaaatccccctaggttgagaatgtgtattagtctgctctcactctgctaataaagacatacttgagactgggtgatttataaaggaaagaggtttaatggactcactgttccacacagcaggggaggcctcacaatcacgacagaggacgaaggaagagcaaaggcacatcttacgtggtggtaggcaagacggcatgtgcaggggaactgccctttataaaaccatcagatcggctgggtgtggtggctcatgcctgtaatcccagcactttgggaggccaaggcaggtggatcacctgaggtcaggagttcaagaccagcctggccaacatggtggaaaccccatctctactaaaaatacaaaacttagctgggcatggtgggcgcctgtaatcccagctactcgggaggctgaggcaggagaatcgcttgaacctgggaggcagaggctgcagtgagccgccatcaggccactgcactccagcctgggtgacagagtgagacgccatctcaaaaaaaaaaaaaaaagaaaaaggaagaaagaaatgaggtctcgttcagttgcccaggctggactgcaatggtgtgatcatagctcactgcagtctcaaacttttgggcccaagtaatccccccaccacagcctctggagtagctgggactatacaggcaggcactaccaacacacccagctattttttgttaatttttttcttaatagagacaaggtcccactattttgctcaggctggtcttgaactcctggcctcagtgatcctcttgcctcagcttccgaagtgttgggattacaggcatgagcccccctgtaactattttttgaatgaatgagttgcaacatttgtatctctcattttctcttgctgttccctacaggaaaatagttgacaaagaaaaaagcaaacagacccatcgtatccttcagctcaattgctgtattcagtgtctgaactccatttcccgggtaagtcagtaaaacaggcacagcaagagggtgaaaacagggagggaggagagtgaggatgaaaggggactcagggggaagatgaaccaaaaatcagagcaatttcattgcccagagccaacggttagtacaggtgtggaaaagcgaggtgggcatggggaagaactaagaggttgctgagttcattggccaacttggccattgtgagtggcaccttcaacagcaaacctgggaaggtcataatagctccaccttagagttgacataacatttgtaaacatgcctagcatggtgcctgcacttaacaatactccagacatggtggctgtttctgttattatggcacctgctcagtcgatatttgttgagtcaacagcaagccacacctgctttgaatcctgattccaggcttatcggagatccaagaacagcctgtcggaaattctgaattccatcagcctgtggcagaagacgctgaagatcattggaggcaagtttggaaccagcgtcctctcctatttcaactttctgagatggcttttgaagttcaacattttctcattcatcctgaacttcagcttcatcataatccctcagtttaccgtggccaaaaagaacaccctccagttcactgggctggagtttttcactggggtggtaagtcctccacttcccctaccccaagtgcaccaatcacctcggaaacccagggacgtgccttgccggtcacccactcacacctctcattttgcctgggggtcaactgatggggaaagtggatgtttgaaatgttttcctggctgagtgtggtgactcatgcctgtaatcccagcaagctgggaggccaaagcagtggagaccagcctgggcaacatggcaaaaccccgtctctacaaaaatgcaaaaattagcagggcatggtggcacacacctgtaattctggctactcaggaggctaaggtaagaggattgcttgagcccaggaggcagagattgcagtgaagcaagattcccccactgcactccagcctgggcaacagagcgaggccttgtctcaatcatcaatcaatcaatcaataaagtgttttcctgcaaagtaacatacacacatcgtagtagaatttctgtctccagaggcaaccatcttgaacagtttgtttttatccacacacttttttggcaaacatatggacacttctgtgcacgtacagaggcattcttttcttttcttacaaaagatgaattattcattgtatattatctacaacttgctttttttttacttagcaatatgtggtgggcattttcttgtgttggtgtttatagatctatgttttctttctttttaatttttatttctacaaaatacaatgttccttttgaaaaattcctactatagaagaaaactaagagaaagttcattttatatttttttctttgtccaactccccattttgagatatatctttgtagactgtttttttcttcctgtacaaacgttgatagatacatacttgataaaaaaaaaaccaaatagatgacaggcacatagattattatgcttttaaaaataaacagaggataggattgtactataagcccttctttctttcttttcttttcctttccttttgtctttctttctttctttctttctttctttctttctttctttctttctttctttcttttccttccttccttccttccttccttccttccttccttccttccttccttccttcctccctccctccctccctcccttcctggaccccaaaatgtctttcataacttgcttattcagactaggattcagtcaacaatcagattttacattctgtgtccgcccccgccttaaatctctattaatctaaaataatcagccgggtacggtggctcactcctgtaatcccagcactttgggaggccgaggcgggtggatcacttgaagtcagaagttggagaccagcctggccaacatggcaaaaccccatctctacttaaaatacaaaaattagccggatgtggtggcagaagcctgtaatccccactactaggcaagctgaggcagggagaattgcttgaacccgggaggttgcagtgagctgagatcttgccattgcactccagcctgagtgacagagcgagactccatctcaaaaaaataaataaataaataaataatctccccagcccagccccttttttcttgacattggcttattgcagaaattgggcctactgctatgtagattccaacatcctaccttctggaattgtctgatgatttcctagtggtttctagaatttgtttctctggcttcttatttcctgtgcactgaaatgtaggcctataggcttgattcgtttcctattaagcatgtttagccataatactggtgacagaggcacataatactggtgaaacgagaggcctggctgtcgtgttcttgctgatgtttcacttgatcactgggccaggtggtaacagctcaatgtctccattgtaaagttacactggatttcttttcaagtctgagagcccagtgacacaatgtccaaattctcagtgcccctttcctggaaaacaaaatgtctaaactgactggcccaggcttcttgtattcaggagaggtcaactctcatgaccataatcgtttaccttttttttcaggagatccacctgacctatggtttattgtacctttcagggttattttagggacacagtgatgtactatggcttttacaccaattccaccatccagcacgggaacagcggggcatcctacaacatgcagctggcctacatcttcacaatcggagcatgcttgaccacctgcttcttcagtttgctgttcaggtatggaagcatctacatttcctgattctgagggtcatgttagatttcagcaaaaatccaagaaattcaaaaattacccaggtaacagtttctctgcagtcctctcctctcctctcctctcttttcttttctttcttagatagagtctcgctctgtcacccatgctggagtacagtggcgcaatctgggctcactgcaacctccacctcccaggttcaagtgattctccttcctcagcctcccgagtagctaggattacaggcacctgccaccacgccccgctaatgtttgtatttttaatagagatggggtttgaccatgttggccaggctggtctcaaactcctgacctcaggtggtccacccgcctcggcctcccatagtcctgggattacaggcgtgagccaccgtgcccagcctgcagttttgactttccattgctgtccaattattccttgtcctgcaatataaaaataggagtttggacagaggaagagaggtttttctgtgcttttaaagaaattggtcagcctgataataagggtgcagttaccccagcaatgatatgaagggaagaacatgatagataactatcagagaggaggtacaaatggaaaatacacatatgaaaggctgggcacggtgctcatgcctgtaatcttagcactctgggagtctgatgcaggctgatcacttgagtccaggagttcgagactggactgggcaacataccaaaaccccatctctactaaaaatacaaaaaattagcctggcttggtggcgcacgcctgtgttcccagctattcgggaggctgaggtgggagaatcacctgagcccattaggtcgaggctgcagtgagctgagatcagtctactacactccagcctgagcaactggagatcctgtttcaaaaaaaaaagagagagaaagaaagaaaagcaacatgcaatctctgtattagtttgctagggctgcctagcaaagtacagcagaccattggtttaaacaacagaaatttattttctcatggttctggaggcctgaagtccaagatcaaggtgtcagcaggcttggtttcctctgaggcctctctccttggcttgtagacggccactgtctcctgcctgtgtcttcacatggttatccctctgtgtcttaatctcccttttttataaagatgccatttgtactgaattgggacacaatttaatgaccccattttaaaaaaatgtaattaccactttaattaattaattaatttattttgagatggagtctcactctgttgcccaggctggagtgcagtggtgtgatctcagctcactgcaacctctgtcccccaggttcaagggattctcctgcctcagcctccctagtagctgggactataggtatgtgccaccacgtccgactaatttttgtaattttattagaaacggggtttcaccatgttggccagactggtctcaaactcctgaccttaagtgatccacccgcctcagcctcccaaagtgctgggattacaggcgtgagccactgcgcccggcctgtaattaccactttaaagaccctacctccaaatacagtcacattctaaggtactagggggttaggacttcaacatacgaattttgggaagtacacagtccaacccatagcaacctgactgccagcatactaattcaaactaaagtgagattttgttttgttctgtcaaagtaggaaatgattttattattattattattattaatattttgagacagagtcttgctctgtcacccaggctggagtgcagtggtgtgatcttggctcactgcaacctccgcttctcgggttcaagtgattctcctgtctcagcctcctgagtagctgggattacaggctcatgccaacacacccagctaatttttctatttttagtagagacagggtttcaccatgttggccaggctggtcttgaactcctgacctcaggtaatcccccctgctgggcctcccaaagttctgggattataggtgttagccatcatgcccggccagaaatgattctaaagttgctgttactgagtggtggcaaatttcagaacagcagcatccgtccatcttgtgcagcatttttgtgtgtgtgctcagggcttcctgggcctgagacagcccatgaccataacagtgccttcatcaagtgcttgctgctgtaagcactgcatagactctttggaaggctgaataatctcccccgaccccccccagagaagtctacatcctaatccccagaactggtgaatatgtaacttcgcataacaaaagggactttgcagatgtgactgaggatttttaaatggggagattatcctggattatcccagtgggcccaatggaatcacaagggtctttataagaggcaggcaggaggtcagagagtagcagggagatgggaagatgctaccctgctggctttgaagttggaggaggtggccacaagccaaggaaagaggacaccctctagaagctggaaaagacaaggaaatggattcttccctagagcttccagaaggaacatagccctgccaacaccttcattttagctctgtggactcattttctgattagctgggtgtggtggcatgtgcctgtagttccagctactttggaggctgtggcgtgaggatggcttgagcccaggaggtggaggctgcagtgagctatgactacaccactgcactctagcctgggccacacagcaagacctcatccctaaacaaacagaaaacacaaaaacaagaaaagacattttctgacttctgatctctagaagggtaaaagaacaaatttgtgttgtttttagccgctaagttggtggtcatttgctatagcagcaacagggaactgggtggattacttgaggtcaggagttcaagaccagcctagccaacatggtgaaaccctgcctctactaaaaatacaaaaattggccgggcgtggtgatgggcacctgtaatccctgttacttgggagactgaggcaggagaatcgcttgaaccttggaggtggaggttgcagtgagcagagatcacaccactgcactccagcctgggagacaagagtgaaactctgtctaaaaaaaaaaaaaaaaattctgtgaggtgagttttattgttattccctctctacagatatggaaactgaggctgagaatcagaaccattcacaagacaaaaatcccccagttggcagatccagggttgcaagccaggcctgtgcagccccaaaaccagtgcttgtttaaccactgtgtggtgaccacaccgctccaggccaacagcttggggctaagtcttcacgttgcctttcaccattaataatagggctgccctttgttgaagccctgcactcccagtgacggccataataaccttcaggtgttctgctttctgccttctctagcatggccaagtatttccggaacaacttcattaatccccacatttactccggagggatcaccaagctgatcttttgctgggacttcactgtcactcatgaaaaagctgtgaagctaaaacagaagaatcttagcactgagataagggtaaggcgagctcactttactcatttgccatcggctggtctccttcccttctccagtatacctgtaacttttcttttttttttttttgaattggagtctcactctgtcgcccaggctggagtgcagtggcgcaatcccggctcactgcaggctccgcctcccgggttcacgccattctcctgcctcagcctcccgagtagctgggactacaggcgcctgccaccatgcccggctaattttttgtatttttagtagagacggggtttcactgtgttagccaggatggtctcaatctcctgacctcgtgatccacccacctcagcctcccaaagtgctgggattacaggcgtaagccaccgcgcccagctgttttttttttttttaacggaatctcactccgccgcccaggctggagtgcagtggcatgatcttggctcactgcaacctctgcctcccgggttcaggcgattctgctacatcagcctcccaagtagctgggattacaggcacctgccacctcacttggctaatttttgaattttttagagatgaggtttcactatattggccaggctggtctcaaactcctagcctcaagtgatccacccgccttggcctcccaaagtactgggattacaggcgtgagccagccaaggcaatgattttcaacccagagaaatctggcccctcagggggacatttgacaacctctagagacttttttgattgttacaattgggaagaggggtgctcttggtatctagtgggtaagaggccagtgatgctgctaaaaatcctacaatgcgtagaacagcacctgcagcagagaattatgcagcccaccatgtcaatagtgcagaggttgagaaaccctggtctatagacacaaacttattaaaaaaaaaaaaaaaaaaaaaaaaaaaagcagctgggcatggtggctcatgcctctaatcccagcaatttgggaggacgaggcaggcatatcatgaggtcaggagttcacgaccagcttggccaacatgatgaaaccccatctctactaaaaaaaggacaaaaaagtagccgggcgtggtggcgggcacctgtaatcccagctactcaggaggctgaggctggagaatcgcttgaacccaggaggcagaggttgcagtgagccaagatcgcgccactgcactccagcctgggcaacaagagtgaaactccatctccagaaaaaaacaaagagcaagctgattttataaataaaggggctttaaattttttttttttatgattttcgagacaaggtcttgctctgtcacccaagctggagtgcagtggtgcaatcataattcactgcagtgtcgacctcctgggatccagttagcctctcccacctcagcctgctgagtagtggggactatgggtgcacaccaccatgcccaactaatttttaaattttttgtagagagagaatctcactatgttgcccaggctggtcttgaactcctgggctcaagtgatcctcccacctcggcctcccaacatgctggaaattcaggtgtgagccaccaaacccagccaaataaaggggcttcaacaagagggttgcagatgtgagcttctttctcagtgtagatacccaaccttattcttcaagaaagaattttgtgacctcagtgtgcttttcttaagaacatggtcccgatctattaattccaactgtttctgaaagatggaagcagtgtttggagattcttggcccatttcagagtcctctatgggtctcccataatccatgttcatcatgaatgttccccctctctctcacctgtggatttgggctggattcatgtctctggatgtggcaagcattccctggggatctttgctagcagtggagagggatctctggataaacttgactttcatttatttttatttatttgtttatttatttatttgttgtttgagacagagtctcactctgtcgcccaggctggagtgcagtggtgccatctctcctcactacaacctccacctcctgggttcaagtgattctcctgcctcagcctcccgagtagctgggattacaggcatgcaccaccacgcccggctaatttttgtatttttggtagaggcggggtttcaccatgttgtccaggctggtctcaaactcctgacctcaagtgatccacccgccttggcctcccaaagtgctgggattacaggcgtgagccaccatgcccagccataaacttgactttcttatgtttctaggagaacctgtcagagctccgtcaggagaattccaagttgacgttcaatcagctgctgacccgcttctctgcctacatggtagcctgggttgtctctacaggagtggccatagcctgctgtgcagccgtttattacctggctgagtacaacttagaggtaaccaacaccagggtccagggcagagagaaccaggtgaagggatgagatgctggaggggaagggtggtgtgcagcctacggttcaacccaggatctatggccagcagcatcagcactagcagagaacttgttaaaaatgcaggggtgaggcacagtggcttacacctgtaatcccaacactctgggaggccgaggcaggaggatcacctgaaacccaggagttcgagaccagcctgggcaacatggagacttcatcgctaaaaaaattttaaaaattagcctgtcacggtggtgtgcacctgtagttctggctacagtggtggtcattcattggtgactacagtttcacatgaatggagctcagctgtgtcgtttcacagccctggggccaggccttgccttgtttgatctcagttaattcttgcaacatctctatgagtcatgtgatcatctctccattgtacagatggagaaaaggggctcagagaagctaaggatctggccccaggccttgcagcttacgtgtggggagggagccgcattggaacccaggttaccctggctccaaaactaccaccaaaaatgcaagtggtgcttttgaaccatccagaggtagacggaggtagggtgaggccatgcagggaggatatgggaatgtgagatatcagataaattcattggaatccctgactccaaggcccatggaaggatgcctagcagaagtgcagtcccggctccactcccagccaaatgccagagtgctgcctcctcctggaggcccagtgcctctcccagcctcacacaaaagtgcagcacagggccaggcacagtggctcacgcctgtaatcccagcactttgggaggccgaggcaggcagatcacttgagatcaggagtttgagactagcctggccaacatggtgaaaccccgtctctactaaaaatacaaaaattagctgggtatgatggtgcacccctgtaatcccagctactcgggaggctaaggcaggagaatcacttgaacctcggaggcagaggttgcagtgagccgagatcgtgccactgcactccagcctgggcaacagagcgagactccggctcaaaaaaaaaaaaaaaaaaaaaaaaaaaaaaaaaaaaccagcagcacgggctagcagagacacgccaaccccctaattcagaactcagagagaggtgaagcctggtgaaaatgaacaaggccacttatgctaaacaggagggagcacatcctcattgccctgggcatcttggtaaaaaagggaaagccacagaatgattgttcgagctcaggctcctgagtcagacacacctaggctccaatctgccacttccttgctgggtgaccctgggcaagtgtcttcccctccctgagcctcagtttgcttggcacggggtaaggaaattaatggtagcttaacaaaatagttaacctagccgggcgcgatggctcatgcctgtaatcccaacaccttgggaggccgaggtggatggatcacctgaggtcgggagttagagaccagcctggccaacatggggaaaccccatctctactaaaaatacaaaaattagctgggtatgttggtgcgtgcctgtaatcccagctactctggaggctgaggcaggagaaccacttgaaccgaggaagtggaagtttcagtgagctgagatcgcgccactgcagtccagcctgggcaacacggtgagactccatctcaaaaaaattaaaataaataaatagataaatagttaaccgcagaggagctacttctcgggttttctatcatgggagacttttgagtgaagcagaaaggggtacagtgtacaagtcagccctccgttctctcccccatcccctgcagttcctgaagacacacagtaaccctggggcggtgctgttactgcctttcgttgtgtcctgcattaatctggccgtgccatgcatctactccatgttcaggcttgtggagaggtacgagatgccacggcacgaagtctacgttctcctgatccggtaggtgatgtgtcgcgcccaacaccagcctctatttccacagagagaagtgggatggcagctagaaaggattatgctttagtatcaaagttttttctccagagaggaagaatttcaaaagtaaggtgtggctgggcgtggtggctcatgtcagtaatcccagcactttgggaggttgagtggggaggatcacttgagaccaggagttcgagaacagcctgggcaacatagccggatgctggctctacaaaaagctggatgcagtggcatgcacctgttagtgccagctactcaggaggctgaggtgagaggatcacttgatcccaggagtttgagcttacctatgattgcaccactgcactccagcctgcgtgacagagcaagaccctgtcttaaacaacaacaaaagagtgaagtgtgtttgtgtggtgtgggcttttgctcaaagtcatggcttgattgctttcctaattgctaccagcaggggattgatgtagttctcaagtatgggatgtacagatgggcaggcagtgcacgcacaaaggctcctgggctgaggacgggactgaaatcatccagcgttccccttagtcaagctgtgagtcctggtacccactgcctcaggcgggaggaagggcccatttttgtaattccaccacccaaacaaaggtgggaggagtgctttgggcaactcactggcacccatggggtgcctttttgtgattcccacaaaggcatcatacgtgctagaagtgatcccagagttttgatacacaaagcctggaactgcccaaattttgtccctctagtttcttcccttactcgttcctggttatggtggggtttataagtacaggtctgtaggccgggcatggtggctcatgcctgtaatcccagcactttgggaggccaaggcaggtggatcacctgaggtcaggagtttgaaaccagcctggccaacatggtgaaaccccgtctttactaaaaatacaaaaattagctgggcttggtgacgcatgtctgtaatcccagctacttgagaggctgaggcgggagaatttcttgaacctgggaggcggaggttgcagcgaaccgagatcctgccactgcactccagcctgggtgacagagagagactccatctcagaaaaaaaaaaaaagtgtaggtctgtacaatgcagactgagtttctttgctgatcagttccagagcccttgccttaccacggtctgtgagatccggctcccggccagcgctccagcctcattttctccccatccttcctgctcactgcctgtccccgtcacagacctcctaagcgttcacaaatatgccaaaccatattcccacctctggacctttgcatgggcctggaatgttcttcccacacatgaccacatggcttgcttcttgactgcattttgcgttcttcaaacatcaccctcgtgttgcactcttccttgcacaccccattaaaaataacagctccctaccaccttttctcctctgcagtataattttctttcttttttttttttttttttttgagatggagtctcattctgtcgcccaggctggagtgcggtggcatgatctctgcagtataattttcttaccacttcctgacatatttgtatttatttattatcttcctctcccacagtttatggggaaatctttgccttgttcacagtgtctgggatatcataggtgtccaagaatgattggtgaatgaataagcaaattggtcagtcagttgattatatccaattcatattatgaaaattccagccaggtgcagtggctcgtgcctgtaatcctagcactttgggtggccaaggtgggaggattgcttgagcccaggagttcaagaccagccttggcaacatggtgagactccatttctataaatatttaaaaattagtcaggcatggtggattgcacctgtagtcccagctactcaggtggctgaggtgggagaagtgcttgagcccgggaggtcaaggctgcagtgagccatgaccacaccactgcactccagtttgggtaacagagtgagaccctgtcggaagaaagaaagagagaaagagagagagagaaagaaagaaagaaaactctgactatattcctatgccctcattattccccacatcccagccaccgatccatggtgccacttttaaaagtttgtatagaaggggaaatgttaggtctcactgcaccccataaccttgcatattgagtatgatgggcataaaataccatctactagatgatggaattgtaaagactgagggggatgattcaataaagaggttggcagtgtacgctgggtcagcacccaataaacattatgtacatttactatcattataatgggaagtgaaatcagatcatttggagatgcaacaaaagagaatgtatcagtcagaataagttaggttatactgcagtaacaaccccccagatctcagtggcttcgaacacaaaggtttatttcttgctcgtgttatatacacagtgtggattagcaggagggaccttcttatgttagttactgagggatccaggctcagagagaagcagccatcttgaatatcgttgatcgccattccaaagggaagatgaggagttctggagagtctcacaggggcattaagtgctccagcttagaagtgacacacattagctgggtgtggtggctcacgcctgtaatcccagcactttgggaggccgaggcgggtggatcacgaggtcaggagatcgagaccatcctggctaacatggtgaaatcccgtctctactaaaaatacaaaaaaaattagccaggtgtggtggcgggcgcctgtagtcccagctactcgggaagctgaggcaggagaatggcgtgaacctgggaggcggatcttgcagtgagctgagatcgcgccactgcactccagcctgggtgactgagcaagactccgtctcaaaaaataaaaaaaaaagaagtgacacacattgcttctgttcacaattcattcactggaactagccatgtgcccccctccaaccacaggggccaggaatttctatcttaccatgtgccccaaaggagctatttgcagacagaatgaaagactgccattgaaggtaatcataaatgttgtctcttctgtttagaaacatctttttgaaaatatcaatcattggcattctttgttactattggctcaacaccgtggccctgtctggtgaagaggtgagattctatgcttctctgccttaagtttggtttcttagcatttgaccaacagggaggacaggggtttctcaagagccatcacactccgtatttggtattaatcccttgtgggaagagaatgaaaactaatctggaaagcaacataaggcaaaatgggtctcaacaaaaaagctcaggttctagagtcaggaggacctgatttgaaggccagctgtgctgtgtcatcttccgagtcacttaatctctttgagcctcagttttctcatctgtaaaattgggattaaatgatatcatgtgtagtataagttcagtgcccagcatatgcaatagacactagtaattttagtgctagtctgtcctaacagctttggggttggacaaaattctttttgatccttgatgttctatttttcctgtaacctagataccctgggctttaccaatatgtaaactcataaatgctggcagtaacaattatgtcctaatgctgactgtttctggccgtccttcacttaactacagtttctagtcttcactgacctcagagaatgggtgcctgagggtggtgtcccatgtggatttaggaacaagccagcctccctggccttctcattgggatgcctctgcccctgctactgcatcccccatgagaatgtgccttcacatcacacagcaatccttagctgatggtcattgtgagctctcagatacccaggatgccctggggttggaagtagagtcaggaatcaggagtctctctctatttctctgtcacccattattcctgggccctaaaatagctctgttgtgtctatactcaaaccatcttacatgaacatggcaccctcaacttctctccctaattgtcgaagagattcaaaatcagccctccaagttagtatggttagagcagataccatattcttcttccatgcattcatccattcatgcatccatccatccattcccccatcattcatttatccatccatgcatctattcatctgtccatccatgtatccatctatccattcattcatacatccatccacttatccatttatccatccatgtatggatccatccatccatccatatatttatctattcattcatgtattcatccatccatttatctaaccatccatccatttattcatccacgtattcattcatgcatgcatccatctatctgtcaattcatgtattcatccagccatctattcatccatccattcatccatccatctatatacccatctatccactcatccatcatccatccatttacccatccatcatccatccatccttgggctgtgcacccaaaagtttcctctcctccttcagccaaatctaaaagctcccagtctatcagctgatagcactgacttcctgcagaagttcctagccactagtttcataaactgactaatttgagcttccagtttacactagcctactaaacctctaggccactttcttaatcaagcagacattaattgattttttgtaaggtaaataagcaaaaagagtgaaggcattcttagccattggcacttctggctctgttgaagaaaccgattacccttggctgagaaatgggatccagaggggatagggcagggaagaaaagttttacggggagagatcatgaacagggaaagtttgggtatgtgtggaaggcaagctttaatgggggaaagaaggaaacccaaaagagaacaacatccctgggaacaaactcagctgcattttttcagagtgggtctacttttttgagtacacaaggacttggtcaaacccaaccattagctatgtcctgatgggtacatagagccaggaacagaggagaattgagctgaggccacagccccttcccacatcctgactcttgtttgccttccagtgttgggaaaccctcattggccaggacatctaccggctccttctgatggattttgtgttctctttagtcaattccttcctgggggagtttctgaggaggtaaatatttgccattcttaagtaattagggcctgatgctgtaaacagaacctgattcctggctgagtgggacatacaggtgcctgacatactcaaagcgtgcgttgttccaagtctgcctgttgtccttggggatactgttcacttctaaattagctaaaatttcaccttaacctgacagttctgttgtcatagttcactcggttcagttgaccttttacaaccttttgaaaacaaattctaaaaataaaagacagaaactgagccatttgaaatcttatccagccgagggcagtggctcacgcctgtaatcccaacactttgggagaccgaggcaggaggatcacttgaggccaggagtttgagactagcctgggcaaaataggaagactctgtctctatccaaaaaaaaaaaaaaagaagaagaagaagaaaaaggcaaagaaagaaaagaagaaaaaaagaaatcttatccactgtagataatttcaatattctagtatatattcctccagatttttctatgcacacattgctctgtgtgtgtctttactatataatgctatataattttcaaaagcaaaaatggagtcacactgcaacatattgtagaatttgcttttactaatctgtcactatgccttgacatctttccatgtcagtacatgtagatttatctcattgttttaattgaattaatgtattaattttatattagatatctatctatctatctatacagaattgaggcactgtcactgtcccatgtctggttttttaaatttagtaattcatttttttaataatatgatgagcctctcattccttatagacatttatgtatttccgcaagctgctctagtaataagatggtctgatgttgattattttctcagtggatagattcaatgccaaatttcctcattcatttttgccaaaatgtgcttttattctagcctctgtcgagggcctggacataaaggtgaaaaggtttggccgggcacagtgactcatacctgtaatcccaacactttgggaggccaaggcgggtgaatcacctgaggtcaggagttcaagagcagcctggccaacgtggtgaaaccctgtctctactaaaaatacaaaaattagccgagcatggtggtgtgtgcctataatcccaactacttgggaggctgaggcaggagaatcgcttgaacccgggagatggaggttgcagtgagccgagagggcgacattgccctccaccctgggtgacacagcgagactccatctcaaaaaaaaaaaaaaaaaaaaagtgaaaagatttttttttgacagatctttttttttaaattggcaactcatctttatgaataaattaatatgaaatcaagtttccccagagtaaatggaaacttggtttccttcttgtggatttagaacacagggaaacataatttgatagcagcaaccaaaaatttaaaaatgtttatttgagttgagaggtgctgagttcatctggttcatgaaaaaataaggtttaattagcaaagaggggtataagataatagtgggataatttaaatgttcagggtaacaaatattctctagaattttttaaatcactttagcagtacccccactagactgcattgtgttaaattagttttccctcaatcccttcaattacttcttcaaaaacatgcttatagatttagaacttttgaaaaattttcaagggaacttacgactttatttcaagctggggagggtctcttttgttgattgtcctagtctgtgggggatcttctgaaagtgggagttatggtttgggtactaaactcagtatgttttcacagaatcattgggatgcaactgatcacaagtcttggccttcaggagtttgacattgccaggaacgttctagaactgatctatgcacaaactctggtgtggtaagttttgtgactcagcaaaatgcccagtggttcccacatgactgtggagctggtgttttggtggcaaagtcccagaatctgttgtttttaaagctgcaggggtgataacccatccagccagtctgagaaccatgaatttagcatttagactatcattttcctttatgagagcttaaggacttcagacaagaatcagcatagagcagggatcgcaacctggaagcccacaggtcgtgtccagctttgcaggtgtgtttcttttgtccctaaaaatatgaattaaccactgctatggtctcaatgtttgggtctcccctcaaattcatatgttgaaaccttacttccaatgtgatggaggtggggtctttgggaggtgatttgatctttgacatggcccttaggaataggattagtgcccttataaacaaggcctgagagaccccttgccccttctaccacgtggggacatggagagaaggcaacatctgggaatcactaagcagggcctcaccagacactgaatctaccagcaccttgatcttggacttcccaacctccagaaccataagaaataaatttctgctgttttatttatttatttttattttttagacggagtctccctctgtcgcccaggctggagtgcagtggtgtgatttcggctcactgcaacctccgcctcctaggttcaagtgattctcctgcctgtctcccaagtagctgggactataggcatgtgccaccatgcccagccaatttttgtatttttagtagagatggggtttcatcatgttggccaggctggtcttgaactcctgacctcaggtgatccgcccaccttggtggatcccaaagtgttgggattacaagcatgagccaccacacccagcctctgctatttataagccacccagtttatggagttatagttatagcagcctgatggactaacacaccacctatatttaaacttcaggagatttcacataacacctaaatttctggcttctctccagaaacatctggcttctctccacaaagatctgtggcaaactgagcatctccagtttgtcacaatctccacctttaactgttgtctgttagcattgatttgccattttgctttgtccttaggttgtttcaatgcaaactttactttgcatccatgtctccacagcaatgggagaataaagaaacacacagagagggctgtgtgtttcttatatttgatacaccatttggtgggttctctatagttttttggatttgtgacgtctgttttagaaactctgcgtgcattgagaatagccaactggttgcagcaaatatttttacaaactcacctagacactgcaaacaattagccagtggctgtgtttccttatttatttatttatttatttatttttaattttcttattatttttttgagacagagtcttgctctgttgctgaggctgaagtgcagtggtgcaacctccacctcccgggttcaagcaattctcatgcctcagcctcccaagtagctgggactacaggcatgtgccaccacacctggctaatttttgtattagtagagacagggtttcactatgttggccagactggttttgagctcctggcttcaagtgacccacctgcctcagcctcccaaagtgctgggattataggtgtgagtcaccatgctcagcctatttatttatttttgagacagggtctcactctgttgctcaggctggagtgcagtggcatgatcatggctcactgcagcctcaacctcctgagctcaggcaatcttcctgccttacttttccttacttattttaacatgatgcagttaatgccggaactctgtgtggtgaatcacattcccaggttccatctgatggggtgttgctaatttgaaagtattggatttggaactggataaactgaattctgaggctggctctgccactcatggagatcactgtgcttgtctgaacctcagattcatctgtaaatgcacataagaatagctacctttaaggccaggtgcggtggctcatgcctataatcccagcactttgggaggctgaggtgggtggatcacctaaggtcaggagttggagaccagcctgacaaacatggtgaaaccccatctctactaaaaatacaaaattagccaggcgtggtggtgcatgcctgtaatcccagctactcaggaggctgacacacaagaattgcttgaacctgggaggcagaggttgcagtgagccaagatcatgccatggtactccagcctgggcagcgagagtgaaactctgtctcaaaaagaaaagaaaagaaaagaaaaggccaggcacggtggctcacgcctgtaatcccagcactttaggaggccggatcacctgaggccaggagttcgaggccaacctggccaacatggcaaaaacccatctctactaaaaatacacacaaaaaattagctgggcgtggttggaagtgcctgtaatcccagctacttgggaggctgaggcaggagaatcacttgaacccgggaggtggaggctgcagtgaacagagatcacgccattgcactccagcctgggcgacaagagtgaaactctgtctcaaaaaaaaaaaaaaaaagaatagctgcctttgaatcatgttgaggattaaatgccatggtaaatgaaaacgctttgcaaacaccaatatgtcatacaacgggaaagttttattttctgactctttaaagttgccctgggtgatttggctgtctgcaaataactcaaagttaatgagtttattttttagagacagtgaggacctttcttttgtagtttaggtgatgtgtttgcatgctgctagatcacccactggcaatttggcagtttacaaagtcctttcttccacattatttcaactaggatgccattgggcaagttacttaaactctctccaaaccttagttttctaatctttaaatggtacagatacctactcacagggttttcgaggggattaaataggcatggtggctcacgcctgtaaccccaggactttgggaggctgaggcaggcagatcacttgaggtcaggagttcaagaccagcctggccaacatggtgaaaccctgactctactaaaaaatacaaattagccggctgtggtagcagatgcctgtaatctcagctacttgggaagctgaggcaggagaatcacttgaaccagggaggcggaggttgtagtgagccgagatcatgccactggctgcactccagcctggagatagaacgacactccgtctcaaaaaggaaaaaaaaaaaaaaaagaaattaccattatgacttctgggcctttgagatttttgttgataaatcatgaataagcaccatcaaaaacacatcttttttttttttctccatggttatttcagttctaacctttgcgggttttaggagaatattgcctttgatgatgagttttacaagaagataatataatgacagaaaaggatatatgttagggacagtagtagagatgaagtgaggaacatgtttcccaagttttagtctattgtacactagcctgcctattttttggtatagtgacgtttcacctgtaccattatctacttaattttttttattatttgcctttttttttttttttttactcaaataagtttttttttaatgccatggtagatgataactgcttttcatcagcctcccaaagtgctgggataacaggagtgagccaccatgtccatttattcttctcaaaaaaccctgtgagtaggtactagtacgtccaccatttaaagattagaaaactaaggtttagagagagtttaagtaacttgcccaacggcatcctagttgaaataatgcagaagaaaggcctttgtaaatggccagactgcttttcccaacatcggcaatcttcctggggtcagtaagaccctagatgtcaaaacgtcaggtgcctgccaccacgcccagctaatttttgtatttttagtagagatgggggttttgccatgttggccaggctggtttcgaactcctaacctcaggtgatctgcccgcttcggcctccaaaagtgatgagattacaggcatgagccaccacgcctggcctctcacatatatttttaagggagtctttatttacaatcataaatggaaaaccagtgccatttgaaagaaatcacaaataactggaaaaataaaagcaatcccattccaaaaagtcattaaattctagcgagatgttacagtttgctaaggctctcagcccgaagcctactcctttcttgttaaaaaatgggagaatggcattctagaaccacactgagattttctccttttgttgctcacgagcaccgcgggagagttgtaaagggaatgcctttctcatttggaactcagtgctattcagtgccttgtccctacaggacctcagaccttgaataccatgggggaggaagaaggagaggggcaaggcatgtgggacatgctagcttagggcatgctgaataccatctgttggtttaataggtgggtgggagatttctctataaaatctcttttccagagctgggaagaaggcagctgaggatactgggtatggtgggaatctgcctaatttgctgggatggaagcaggccccctctgtgttcgtttgctggggctgccataacaaagtctcacacactgagtgccttaaacaacatcaatttcatatcttacagttctggaggccagaaggccaagatcaaggtgcgggtggggttggtttcttctgagggtcataagggagggatctgtctcaagcctctctccctggtttatagacggccatcttctccccatgtctttacatggtcttcatttctgtgtgtgtctatgtcctaatctcttctttttttgttgttgagatggagtcttgctctgtcacccaggctggagtgcaatggcacaatctcggctcactgcaacctccgcctcccaggttcaagcgattctcctgcctcagcctctcaagtagctaagattacaagcatacgccatcatgcctggctaatttttgtattttttgtagagatggggtttcaccatgttgcccaggctggtcttgaactcctgacctcaggtgattcaccccctcttggcctcccaaagttctgggattacaggcataagccaccgttcctggcctcctaatctcttcttttagggacaccggttgtactggattagggcctcctacagtgatctcattctaccttaatcacctctcaaaggccctgtctccaaatacagtcacattctgagatattcggggttaaggcctcaatatatggattttggggacacacaatccaggccacaatatcttctttctcttccccccaaccatcccagattcaccccgactccttgtgtctccgccagcctctgacactcaccctctctccctcacaggattggcatcttcttctgccccctgctgccctttatccaaatgattatgcttttcatcatgttctactccaaaaatgtgagtcagtccgacattgccatcaatcagctttgttcagtcacctgtgacctggtggcgcttaaagctggggaagggggctctgcaaaggtgtcaggaagccaggcctggctggggtccctctgccgctgctccggctgcagatgggaggtggctgcctctctctcttcagatcagcctgatgatgaatttccagcctccgagcaaagcctggcgggcctcacagatgatgactttcttcatcttcttgctctttttcccatccttcaccggggtcttgtgcaccctggccatcaccatctggaggtaggagaaggtggccttgggggaggttttagagactgggtggatgggtgtgtgttttaaaacgtaggttttattataattcaggtgtggtgaggccgggtgcagtggctcacgcctgtgatcccggcactatgggaggccaaggcgggtggatcacttgaggccaggagttcaggaccagcctggccaacatggtgaaaccctgtctctactaaaaatacaaaaattagccaagtgtggtggtgcatgcctgtaatcccagctgctcttgaggctgaggcaggagaatcacttgaacccgggaggtggaggttgcagtgagccaagattgcaccattgcgctccagcctgggtgacagagtgagactctgtctcaataaataaataaataaataaataaataaataaataaataaataaataaataaataatgtaggtatggtgaagcccaacaggtcaggaatgaccatcactaaaaagatagtttattactcacagttcctgagaagagggggcactctatgccacaagggaccacacagggaagcatcagggttgttcaggaggcagagggagtgaggggaaacgggctagaggctttattgtggttttctatggtaaggaatgggcaaggcaggggaagcaggtttagggttggctggtttgtcagtaggctgtgggatatggatccgccctgagttgtctggcacctggccctggggtgattagggcaggggagtggtggcccagagtgtgagagcctgataaagggggcggttgcgggtgtgggatctggattggttggtttgcatttgaaaggtgtgctttgtaagctagcccagggaagggcagctagccctgggagctggagtcagtaagaccccagatgtcaaaacatcagaataaaaagacatgcttaatacagtgcctaactcaagttccctggctaaccaacagacactaaaagccagggagggaatgcatcctagtttgatcaccacccatccgatgcccacggtcaggagtagctttctcacttctgccaagaactgaagcttcccagaatggggaagatgcccccccaccccgttcctccacatccagaacagaacttcatctaaattaacagaaaggcaggactcatctggctcctcccacctctccaaccccacttccctttggctccactgttccccgcgccaccaccctcaccccattcctggaagccagcaagcccctcccaacaagggcagagtcctctgagtgaagtccttttcccactccctttgcttggctgcctcctctccaccctctgattctcagctccaaggccctctccaagatctgatcttcacagccctccttgtctgctctcagttccccactgcttctctctctcagacctgagtttctttccttcattctatcattcataatcaggaatgcctctgtgtgagtctttaattgttactcaacgattgtccgtttttcccaccagaatgtaatcccaatagggcaggaacttgcttaatatgaagtccccagagcctgactagaacagtgcttaacagaataagccatggttgaatgaacaattgaatgaattaatgaacaagggagatgatttttaggacacatgtgaaactggggctctcagttccttgctccacaacacccttgctcctcttggcatatccactctcttctctctcttccttgctccacaacgcccttgctcctcttggcatatccactctcttctctctcttcctcaccagttccttgttgccctatagtttctgctcattcctccatagctaacaggcttccctctttatgcttcttaattcaatttctttctttgagacagggccttgctctgccacccaggcaggaatgcaggggcgcaatcacagctcaaactcctgggctcacgtgattgtcccacctcagcctcccgagtagctgggactataggcacacatcaccatgcctggctaattatttttttattttttatttttttgagacagagtctcactctgtcatccaggctggagtgcagtggcgcaatctcggctcactgcaagctccgcctcccaggttcacgcccttctcctgcctcagcctcctgagtagctgggactacaggcgcccgccaccacgcccagctaattttttgtatttttagtagagacagggtttcaccgtgttagccaggatggtcttgatctcctgaccttgtgatccacccgcctcggcctcccaaagtgctgggattacaggcatgagccaccgcgcctggcatgcctggctaattttttttttttttttttttttagaaatgggtgtcttgctatgttgcctaggctggtctcgaactcttggcctcaagagatccttctgccttggcctctcaaagtgctggaattgcaggcgagccaccatacttgtctttaatttcatttctttttttttttcagacagggtcttgctctgttgcccaggctgaagtacagtggtgtgatcacagctcactatagcctcaacctcctgggctcaagtgatcctcccacctcagcctcctatgtagccaggaccacaggcatgtgctgccatgcccagctaattatttttttgtagagatggagtctcactatgttgcccaggctggtcttgaacttctgggctcaagcaatcctcccaccttgacctcccaaactgttgggattagaggcatgagccatagtgcctggccttaattcaacttcttaagaaaaaaagtctgactgcccccattcatatcattgagccaagttactgcagaagtcactgcttggcctttggattggctgctgttgggtcagctctgatctgagagcaggtccttagagtacaggtcaccccagcaaggctgagagcaagagggtttctttgggaagtgggtgtgattggatcaggcaagacttgatgttttcaggcccagagcccagaagggacaccctgattctagaataaccatccctgagtcttgtgctagagatgttcttccatctttgttttaccagattgaagccttcagctgactgtggcccttttcgaggtctgcctctcttcattcactccatctacagctggatcgacaccctaagtacacggcctggctacctgtgggttgtttggatctatcggaacctcattggaagtgtgcacttctttttcatcctcaccctcattgtgctgtgagtgtggtacccggggaatctagcagggaaagccaggagctctcgagggaaacagcagtagggatgtttggttggaaagcaaatggctatagcatagctcagtgttctgggtgactctacccttgcataggtagttttctttccttccttccttccttccttcctccttccttccttccttccttccttcccttcctttttttcttttctcttctcttcccttcccctccctccctctctttctccctttctcccttccctttcctttcagttccgttcctttcctcttcattttttcttccttccttccttccttctttctcccttcccctcccttcccttccccttctttctcccttcccctcccttcccttcctttccccttcccctcccttcccttcccttccccttctccttccttccttccttccttccttacttctctctttcttttttggttgagacagggtcatgatctctcactcaggctagactgtagcggcatggtcatggcttgctgcaacctcaacctttcaggctcaagccatcctcccacctcagcccccaagtagctgggcttgcaggtgtgcaccactacacttggctaatttttaaattttttggagaaatggggtctccctgtgttgcccaggctggtctcaaactcctggcctcaaattatcctcctgcctcagcttctcaaagtgttgggattacaggtgttagccaccttgcccaagcttgcattgatagtttttttgaagttacttagcctggtgcagtggcttgtgcctgtagtctgagcttcttgggaagctgagatgggaggattgcttgagcctaggagtttgaggctgcagtgttctctgatcgtgccactgcactccagcctgggcaacagagcaagaccccatcactgggggaaggggggaaaggttatatatactatcttcttgtcttagggattttttttttttttttttttgagacagagtctcgcactgtcacccaggctggagtgcactggcgcgatctcagcacactgcaagttccgcctcctgggttcatgccattctcctgcctcagcctcccgagtagttgggactacaggcacccaccaccacgcccagctaattttttgcatttttaatagagacagggtttcactgtgttagccaggatgatctcgatctcctgacctcaagtgatccgcccgccttggcctcccaaagtgctgggattccaggcatgagccaccgtgctgggtcatcttagggactttttttttaacttattctattaagaaagcaatacctgcttttctcctcttaaggagatgacatgcccagagatgctcaattaattggtctgaagaggagctgtggcatgggcttatttcccccttcaggaaccattgttccaatgtatttaacctataactctccctgacatgacttttcagaaacatgtttgggccaaatccatctgcaagcacagattccagttcctttgcatccagtggaaattcagagcctgcaaaacatttgcaagagtgtcattctttcttttctcctcttccagaatcatcacctatctttactggcagatcacagagggaaggaagattatgataaggctgctccatgagcagatcattaatgtaagtccccttggatccctctgatgtccgccctcaccctttttaaacgctgtataaacatcctccaaaataaagagaatactacaatgaactctcatatccctgctctcagccctaacaaccatcaatgtttttatattcttatttcatctacactttctcttcccagcaaatcccttatttttattcttagtatttatttattttaattatgatgattattattattattttgagatagagttttgctcttgttgcccaggctggagtgcagtggtgcaatctcggctcacggcaacttctgcctccagggttcaagcgattctcctgccccaacctcccaagtagctggaattacaggtgcctgccaccatgcccagctaatttttgaatttttagtggagacagggtttcaccatgttggccaggctggtctcgaactgctgacctcaggtgatccacctgcctcccaaagtgctgggattacagccatcacacccagccttattttatttttttagaggtgggggtcttgctatgttgccctggctggattcaaattcctgggctcctgcctcagcctccggagtagctgagattacaggcaggtgccactccatctggctccctggattattttaaagcaaatcttaggctttatattattttttatttattaaaacttagatatatatatatatatatctctctataagataaatacttttatttcatttatttatttattttgagacagagtttcactcttgttgcccaggttggagtgcagtggagcaatcttggctcactgcaacctccgcctcccgggttcaagcaattcttctgcctcagcttcccgcatagctggaattacaggcgcctgccaccacacccggctaattttgtatttttagtagagatggggtttctccatgttggtcaggctggtctcaaacttccgacctcaggtgatccgcccgcctcggcctcccaaagtgctaagattacaggtgtgagccatcgcccccagctgagataaagacttttaaaaataactacaatatcatcatcacacttaaaaaacttaacaataatttattattatcatcttatatccaatgtttacatttccccaactgtccccttaagtgtctttttatactagaactgcacaaatcaggatctgaaaagggggtacatgttgcatttggttaatgtctctctctctctctctctctttttttttttttgagacagaatctcactgtgtctcccaggctggaacgcagtggcatgattttggctcactgcaacttctgcctcctgggttcaagtgattctcctgcctcagcctcctgagtagctgggattacaggtgtgtgccaccacgcccagctaatttttgtatttttagtagagacggggtttcaccatgttgactaggctggtctcaaactcctgacctcaagtgatccacctgccttggcctcccaaagtgctgggattacaggcgtgagccactgcgcccagccaatatgcctaactttcttttactctataaccatttaccacttcccctccccacttcctcttttctttttattgttaaagaatgcaggtcatctgtttcatattttccatatcctacatatatcttttttttttgttttgacatggagtcttgctctggggcacgtgcctatgggggatactggaaaccatttttcctgggtattgagacgtggcatgtaagttgcttccagcagccgacttctggaggctactttctcaagcctgttaggggaattgctttagaggagaatattacagtgcaggaaggctctgggggataatttggttttactgtgaaatgtttcttttctttcaccaaaagatggcagtaacctccatccaacttctaggatcctagctgcctgaaaaccgacgttcttcccatcaattgctttctcaattccataccatcattcattcatatttttgtttctttctggttttgttttccttcttggtaggagggcaaagataaaatgttcctgatagaaaaattgatcaagctgcaggatatggagaagaaagcaaaccccagctcacttgttctggaaaggagagaggtggaggtgagtctggaggctgccttggggacccctgggacacgagcttgcctccatgtaaaaagcgcgtcagagaactacagaccaagctcttgggatcatggaagggcccttcactctctgtcttaagtatttctgtggtttttacttaaaaagtaatattcatggccaggtgcagtggctcacgcctgtaatcccagcactttgggaggcctacgcgggtggatcaagaggtcaggagtttgagaccagcctggccaatatggtgaaaccctgtctctactaaaaatacaaaagttagctgggtgtggtggcacgcacctgtagccccagctacttgggaggctgaggcagaagaattgcttgaacccaggaggtggaggttgcggtgagccaaaatcatgccactgcactccagcctaggtgacagagtggcactctgtctcaaaaaaaagtaatattcattttttcagcacttttcatgcctgtactttttctaggtgctggggttacggtgaacaaaacaaagcccccgccctcatggaacttgcacgcttgtttttcacaaccccgataatacagaagtagatcccactgagatgaaaagggccctgaaatctcatctcactatgaatacttcagtgtctattctttttttttttttttttttttgagacggagtctcgctctgtcgcccaggctggagtgcagtggcgggatctcggcgcactgcaagctccgcctcccgggttcacgccattctcctgcctcagcctcccaagtagctgggactacaggcgcccgccactacgcccggctaattttttgtatttttagtagagacggggtttcaccgttttagccgggatggtctcgatctcctgacctcgtgatccgcccgcctcggcctcccaaagtgctgggattacaggcgtgagccaccgcgcccggcctacttcagtgtctattcttgcaaatctatttccctaggcatctgcaaacatacctgtatctaccaacactttaatttacttgtttattacaaaagtgaggctatattatacaaatagtatcataacttccctcccccgcagcccaccactaaatactatatcttgaacgatgtttaattctgtacatatttggatatttgggttgtttctatgtttttaaatacttaaaacagtaggtaatgaaacattttgttacaattattttttgtgcgtttataatcgcagctactcaggaggctgaggtgggaggggaggactgcttgaggccaggagtttaagaccaacatagcgagaccccatcccttaaaaaattttaataattaggcacggtggcatgcaactgtagcctcagctactcaggaagctgaggtgagaggactgctcaaacccaggagtttgaggctacagtgagctatgatcccatcaccgcactccagcttgggagacagaacaagaccctctctctaaaaaaaattaccctgggcacagtggctccctcctgtgatccccagcactttgggaggccgaggcgggcttatcacttgaggtcaggggttcgagaccagcccagcaaacatggtgaaacccatctctagtaaaaatataaaaaacaaaaacaaacaaacaagaaaacttagctgggtgttgtggtgcacatctgtaatcccagctacttgggaggctgaagcacaggaaatcacttggacccaggaggtggagattgcagtgagccaaggtcacaccattgcactccagcctgggcaacagtgcaagactccgtgtcaaaaaaaaaaaaaaattaaaaagttattttttgtgaatatttctgccacaaagcacgtacatgacaatgttaatagatattgctatatcattcccttaaaaagatttaatcaatttcattcttaccaagagaatataaagatacatgaaaccctgctctaattccaaagccttgcttgcttcctgagtgtcctgaaaatacagatgaacagtaaatccaccttaacgcaaataccacttatgttggaaattgtgatcttgacagaagtgactgacaagtaatttaccatctgtgcaaatttatactgtcagcacaatttaggtaagggatctagaggcctaaaggtagattctctgaaggtgaggaccacgtctgtgcacttgtcaccccacgtcctaatttattacctggcataatatgaatgctcagtgaatatctgtggaacggccaggtgcggtggctcacgcctgtaatcccagcactttgggaggccgaggtggacagatcacttgaggtcaggagtttgagaccggcctgaccaacatggtgaaaccctgtctctactaaaaataaaaaaaaaaaattagctgggcgtggtggcaggcacctataatcccagctactccagaggctgaggcgggaaaatcgctggaacccgagaggcggaggttgcagtgagccgagatcatgccattccactccagtctaggagataaagcaagactctgtcaaaaaaaaaaaaaaaaaaaaaaaaaagagtatctgtggaatgaatgaatggaatcactctccctaaaaaacaaaacatgttcaatatttctatggcggagacttggccttaatctctcatcccttaacttctataaaatggtgaggggctcacaaattgtgccaaatatgtgacaagacccagaatctgcattcttcctccgtgacgtggctgcttgtttttttctttttcagcaacaaggctttttgcatttgggggaacatgatggcagtcttggtgagtaattaaactgggacagaataagacactaatttatttctggtgaaatatcctaagacaagtgtaagaattgctcatgtgtccattactttttcagttgcaaattggatccaaactggcttaaacaaaattccaagaataattcttgctttaggccttgcctaacgcaggaactcacagtgtcaccagaacccggtttctttcagttccgttcttacccatgttagttccttttgcaatagactctgcctaataagtgcaagacagctttatcaacttcttatatcttctcagagtcagtctggtgggaaagactgagggacccaggattctcacggtgtttcataggatctgactgggtgatgtccccgtctatgaaccaattgttgtgggtgcaaaaatgtggcagttcccttgatcacatgatttcatctgtagatgcaggtggtgcaaccatgaagaccatagggaccaagagtagggaagggtgacttcctaaagaaaatctggggctgatgccaggagagcgaattctgggcaggaaacaaacaagcaaacccatttatttttgggggatagcatttactgatgacttccagtgatgggagttcaagggaaggattatagaaactaaaaggaagaggcaaagaaggcatgagaagctatggaatcttgaaggcaagctggtctttcccttgtagagatggggcagagtgtgcctgcgttaacttctctttcctgtgtcaaacctagacttgcgatctagaagatcagttcaagaaggtaatccaagggcctgatgactcttttggtaaccagacaccaatcaaataaggggaggagacgaaaatggaatgatttcttccatgccacctgtgcctttaggaactgcccagaagaaaatccaaggctttagccaggagcggaaactgactaccatgtaattatcaaagtaaaattgggcattccatgctatttttaatacctggattgctgatttttcaagacaaaatacttggggttttccaataaagattgttgtaatattgaaatgagcctacaaaaacctaggaagagataactagggaataatgtatattatcttcaagaagtgtgtgcaggaatgattggttcttagaaatctctcctgccagacttcccagacctggcaaaggtttagaaactgttgctaagaaaagtggtccatcctgaataaacatgtaatactccagcagggatatgaagcctctgaattgtagaacctgcatttatttgtgactttgaactaaagacatcccccatgtcccaaaggtggaatacaaccagaggtctcatctctgaactttcttgcgtactgattacatgagtctttggagtcggggatggaggaggttctgcccctgtgaggtgttatacatgaccatcaaagtcctacgtcaagctagctttgcagtggcagtaccgtagccaatgagatttatccgagacgcgattattgctaattggaaattttcccaataccccaccgtgatgacttgaaatataatcagcgctggcaatttttgacagtctctacggagactgaataagaaaaaagaaaagaaaagaaattagctgggtgcgatggcttatgcctgtaatcccggcactttgggaggctgaggcaagcggatcacttaatgtcaggagttcaagaccagcctggccaacatggtgaaaccccgtctctactaaaaataaaaaaactagctgggcgtggtggtacatgcctataatcccagctactcgggaggctgaggcaggagaattgcttgaacctgggaggcagaggttgcagtgaggcgagattgtaccactgcattccagcctgggcaacagtgagactctgcctcaaaaaaataaataaataaataaataaagtaaattaaaagtcttattcaaaccaaatatgaaactggtggtgatgtgtggaatgtgtgtgtgtgtgcacatatgtaatgaatacgtgtgtgtataatgtttttgcaggtttgccaaatgattcacaagccacgtggctgttcttaacactgaaaggtccagcagaaaggtgcagttactcaggagagaggagcctcctcttaagtaatcactcgcataaaacctaattggaactgaatttagaaagcagttaagatacattcgaaacacaagcacccaaccagtgctgtcatttattcccttttttttttatttttaagagataaggctgggctgtgttgccagctttgactcaaactcctaggtcaagcagtcctcccacttcagcctgccaagtagctgggactacaggcacacgccactgcacttgaccacgcactttttcattcacttatttttttcattaattcacttcatcggaggaattaatttcttttggtgtcatctttggtaacagttgtatgtagtgttcatccatccattcattcaacaaatatggaccaaatagtggtgagcaagatggtgaacaattcatggtgctgcctgtctagcaggtttagacatgaatttaattcttaagcaataattaattacagttgtagtagatgctctgaagaagcacagggactaagggagacttgtctgtggggtcagtgcaggcaacccatggaagtgatgttggaagtgattttattccccttggggtcatcttagtgctgtttgtgcttttttctttgcttttttttgagatggagttggagcctccctctgtctcccaggctggagtgcagtggtacaatctcagctcactgcaacctccccctcctgggttcaagtgattctcctgcctcagcctcccgagtagctgcgattacgggagcgtgccaccaggtccggctaatttttgtatttttagtagagacggggtttcaccatgttggctgggctggtgttgaactcctgacctcagatgatccgctcgcttcagcctcccaaagtgttgggattacaggcgtgagccaccatgcccggctgctgcttgggcttctacaatgaaatctgaactctctctgaaagcatcacttctgctcattcaccagatgctaagtgcttccatctagaatgcttctcccttcacctccatcccttgtctccacttcagtgcagccctgcttctcctggaggtgtacatgcagtggatagtggctcatgcctgtaatccccgcactttgggaggctgaggtgggcggatcacctgaggtcaggagttcgagaccagcccagccaacatggtaagaccttatctctactaaaaatacaaaaattagccgggcgtggtggcaagcgcctgtaatcccagctactcaggaggctgaggcaggagaattgcttggacccaggaggcagaggttgcagtgagctgaaatcgcaccactgcgcttcagcctgggtgacagagtgagactgtctcaaaaaataaagaaactactgtacatggaaagcattttaaacagtctaggacatggtaggcagtcaataaatgttaattagcaaggattttacatgcactctttcatttaatcactaccaccgcaagaatactacccctattttacagataaattcagtaacttacccaaggtcatatagctggtaagttgctgaataggaaggcagacttggctttctctgattccaaatcctgttattaaccctatactaagccttccaaggaagtgcttaatagtagttattaataccttatttcatcattcaaattctccaccttttgaggccctgaccatcttagcataggacctaaatccttaatttggcctggctgaatcaaaggtaaaatggatttgggataaagatcaagagacagagatctcatggctctccagagatcttcccacaacacaaagggatattattattattatgaaatttttaaagattggagtcaaactctgtcccctaggctgtagtgcagtggcacgatcctagctcactgcagcctcaacctgctaggctccagtgatcctcccatctcagcccctatttgtaaattttttgtagagatggggtctcactatgttgcccaggctagtgttgaacagcctgttgaacagctagtgttgaacagaggtatcttttttttttttttttttttttttttgagacagagtcttgctctctggcctaggctggagtgcagtggtacaatcttggctcactgcaacctctgactcctgggttcaagcaattctccttgcttcagcctcctgaatagctgggattacaggcatgtgccaccatgcccaactaatgtttgtatttttagtagagatggggtttccccatcatggccaggctggtctcaaactcctggcctcaagtgatccacccacctcagctcccaaagtgctgggattacaggtatgagccatcacgcctggcctgatgtatcttctttggtcactttttcctcctcctttcactctagtcataacatggcacggaagtacatgcagtttagacatttgttgcactcaatgaacaaatctttgttgtttattttaaaattcaagacaatttttttgcaaatgctgattcaaaacgtaccaatccccatctatcatgcctatgccaatacaatctgtcacaaaaaagtttgcttctcattgtcacatagctatggggactggtggccttctaaaatcactgtccagctgctgcaagtgtgaggccagcaacccacggcagggatgcaggagggaagccatggctaagctgtgggcctggacaaaggccacagatggggttgaaaggtgagaagcggtaagctagaggagacagacggcgttgccattaaaaacaattcaacttcattttaatgttgctatgtaagttcacaataaaatccctggaagttcaaattggaaagagcagtttggggtcatgggctcaacaatataaaggcagattcagtgaggggtaagggtagtggctctgggggcagactgacctagatttgaatgccagttgtaccagactcaagacaccttgggtaagtggttttatgaagtacctcagttcttcatcagtagaaagagtgctaacacctccataagacttttgtatggattgagtaagataatgcatgttaaaccacttgtatagtttctggctaactgtaaacaagatgttctagaagttctagttatctttttttttttttttttttttttttttttaagagtcaggttctcactgtgccaccaaggttgtagtgccgtggtgtaatcatggctcattgcagccttgaacttctgggctcaagtgatcctcccacctcaacctcctgagtagctgggaatacaggcatgcaccaccatgcctaattttttagagatggggtcttgctatattgcccagtctggcctcaagtaatcctcctgcctcagctttctgaattgctgggattatcggcatgagccactgtgcccagctaagctgtgacttttgaggcaaccccttcccttccacagagtttagtttcctcatttgtaaaatgaggacaaacctagatatttttggaagtttcttccagttctaattgcctatgatcagatcacatctgttgcagagcttcctaaaaagcctggaaaaatgcaactctgccccctggtggtttgcagctctctattcaagatgctataaatccctcattggcttcaagacctccctaccattttggttgctgtacactgaagcctcactggattgcatggtggcttccccaaattccgtatgccttaggatatgatgcttggcacacagttttcctttagtgctccttttaataattttattagtatggccacaagtttgatgtctacagtacatgttaacatagctgagtacaaatatttgaaataagtgtggcaagttttaaaatgtcaactctgagttatcatgcatgtcccatgcatttacatctgcatctgcaaactgtacaattcaatctgtgcttatcctcactgggtctccctgtgtgcctcagctagggcagggcaggggctcttgtgcgttttttcagacccagattttcaagagcaacagtgttgaactctggcatgccatggtgcatggtggcaacaccgggtttagctttggttcaggtaaaaatgcagtgaccaactattgcatttgtgtgagtcacctgattccccagggcctgggctagcacaaagggtattttgatatccctgtatgaggcccctggcagtttctgaacccgtttcgtcccaccgtgaaagtctagaagtgaggttcgcagtcttctaccatgctgtcagtgatatagctggaaccaagatgggattcgtagtaactcttttcatcaaaggtattaacagtccaaccaacaacctggattcctttagc

SEQ ID NO: 1880 - protein, 620 aa, Homo sapiens
MATLCQVLLEVAMAYRRSKNSLSEILNSISLWQKTLKIIGGKFGTSVLSYFNFLRWLLKFNIFSFILNFSFIIIPQFTVAKKNTLQFTGLEFFTGVGYFRDTVMYYGFYTNSTIQHGNSGASYNMQLAYIFTIGACLTTCFFSLLFSMAKYFRNNFINPHIYSGGITKLIFCWDFTVTHEKAVKLKQKNLSTEIRENLSELRQENSKLTFNQLLTRFSAYMVAWVVSTGVAIACCAAVYYLAEYNLEVTNTRVQGRENQFLKTHSNPGAVLLLPFVVSCINLAVPCIYSMFRLVERYEMPRHEVYVLLIRIGIFFCPLLPFIQMIMLFIMFYSKNVSQSDIAINQLCSVTCDLVALKAGEGGSAKVSGSQAWLGSLCRCSGCRWEVAASLSSDQPDDEFPASEQSLAGLTDDDFLHLLALFPILHRGLVHPGHHHLEVGEGGLGGGFRDWVDGLKPSADCGPFRGLPLFIHSIYSWIDTLSTRPGYLWVVWIYRNLIGSVHFFFILTLIVLIITYLYWQITEGRKIMIRLLHEQIINEGKDKMFLIEKLIKLQDMEKKANPSSLVLERREVETQIFKSNSVELWHAMVHGGNTGFSFGSGKNAVTNYCICVSHLIPQGLG

SEQ ID NO: 1881 - DNA, 1886 bp, Homo sapiens
  source
  (1)..(1886)
  CDS (201)..(712)
  CDS (1071)..(1686)
  modified_base (52)..(151): a, t, c, g, unknown or other
  modified_base (1015)..(1015): a, t, c, g, unknown or other
  modified_base (1177)..(1177): a, t, c, g, unknown or other
  modified_base (1179)..(1179): a, t, c, g, unknown or other
  modified_base (1194)..(1195): a, t, c, g, unknown or other
  modified_base (1212)..(1212): a, t, c, g, unknown or other
  modified_base (1218)..(1218): a, t, c, g, unknown or other
  modified_base (1306)..(1306): a, t, c, g, unknown or other
  modified_base (1359)..(1359): a, t, c, g, unknown or other
  modified_base (1387)..(1387): a, t, c, g, unknown or other
  modified_base (1410)..(1410): a, t, c, g, unknown or other
  modified_base (1418)..(1418): a, t, c, g, unknown or other
  modified_base (1448)..(1448): a, t, c, g, unknown or other
  modified_base (1465)..(1466): a, t, c, g, unknown or other
  modified_base (1483)..(1484): a, t, c, g, unknown or other
  modified_base (1495)..(1495): a, t, c, g, unknown or other
  modified_base (1529)..(1529): a, t, c, g, unknown or other
  modified_base (1535)..(1535): a, t, c, g, unknown or other
  modified_base (1553)..(1553): a, t, c, g, unknown or other
  modified_base (1557)..(1557): a, t, c, g, unknown or other
  modified_base (1571)..(1572): a, t, c, g, unknown or other
  modified_base (1576)..(1675): a, t, c, g, unknown or other
  modified_base (1711)..(1711): a, t, c, g, unknown or other
  modified_base (1768)..(1768): a, t, c, g, unknown or other
aagggaagaagcctggagggcagaatagaggtgagttctgaaaacagaaagnnnnnnnnnnnnnnnnnnnnnnnnnnnnnnnnnnnnnnnnnnnnnnnnnnnnnnnnnnnnnnnnnnnnnnnnnnnnnnnnnnnnnnnnnnnnnnnnnnnntggtgttgcggcggctgatctcgggttcttcgtgtagtctgtccgtttcatggcgtcgctgttccttctgtcgctcgttgtgtccctgcgccgtctctgctgcgttcttcctctgtggtcgctctcttctctctttggtctctctcccgtatttctttgtgttcactgtggtccttctggcgttctatcgccggatgccctttgctttcgtctgctgttgtcgtttccttctcttgtgtgcgcgttgtcgtgttctctcgcgcctgccgtgctcctcggtctccttctgcggtgcgtcccgcctcctgttttccccttgcgtcttgtgctctgtgtgcattgttcctgctccgtgtggtctgtgtcgccctggtcgtccgctcttctgttctgttgtcctgctgccggtgtttcgaatcttctctcctccggccgtttcgcctgtctttgtgcgcgttgcgggtcgtgtggcgtcccccggggtgttctcgtgtcgcttctgctccgcgtcttctgttgcgtgtcggtcttctctcgcgctttcgggtctttccctccgcggtgcggttgttgggtttggcgcctccgttttcctgtttgtctgtttggccgtgccgtttttccggtgtgtggctgtggttgtcttcctgtttgtcgcgcctgtgtggtttccttggggtcctccgcctggtctccttttttgtcctgtcgggtttcgccccctctgccttgtgcgtcgctttttgtgttgcttgtctcgggggcgtggcttttgggttcctgcctgctgcgcggcctttttccggttcttggccttttgctggccttttgctcccttgttttttccctgcggtttccccctgnttctgtgggttgccggtttcccgccttttgtgtgtgctggttccgttcgccgcagccgtccgcccgggcgcagcgagtctgtgtgcgtgcctgcggtcgtgcgccctttcgctatccgcctctccccgcgcgttggccgtttcattaatcaagcagacacgncnggtttcccgactggnnggcgggcagtgggcgcnccgctnttgttgtgggttggctccctcgttgggctccccgggctttcccctttgtgcttccggctcgtctgttgtgtggctttgtgggcggttnccgttttctctcggggcctggctttgcccttgtttcgggtttggggctcggtncccggggttcttctggggtcccgtttgnttgttgccgggttgcccttgttnggcgttgncggcggcttttgcctctccgggggcgggtnggcgggggtgtcttgcnnggtccggggtcccgtgnnggcgggctttntcgcggcgccgggctcgggaccggtcggtggcgntccggnctttgtgctcgtcgggcntcgnttcttcttcggttnntccnnnnnnnnnnnnnnnnnnnnnnnnnnnnnnnnnnnnnnnnnnnnnnnnnnnnnnnnnnnnnnnnnnnnnnnnnnnnnnnnnnnnnnnnnnnnnnnnnnnncggcgttctaatatggtattgtgactcgtcctagtntcttcgtagatcgtgtcgtatgcgtcatgtgttatcgagagatatgtgcgcgtcgtnggtcactcgtctctcatgtagaagagagcgtgtctggtgtgtcagacttaatgagacatatgtgtacgggtatatgtctttgtacgcgtatgcaatggttttttcgtgaatgttagaa

SEQ ID NO: 1882 - protein, 375 aa, Homo sapiens
  MOD_RES (207)..(207): Variable amino acid
  MOD_RES (213)..(213): Variable amino acid
  MOD_RES (250)..(250): Variable amino acid
  MOD_RES (277)..(277): Variable amino acid
  MOD_RES (284)..(284): Variable amino acid
  MOD_RES (287)..(287): Variable amino acid
  MOD_RES (297)..(297): Variable amino acid
  MOD_RES (303)..(303): Variable amino acid
  MOD_RES (309)..(309): Variable amino acid
  MOD_RES (313)..(313): Variable amino acid
  MOD_RES (324)..(324): Variable amino acid
  MOD_RES (326)..(326): Variable amino acid
  MOD_RES (332)..(332): Variable amino acid
  MOD_RES (338)..(338): Variable amino acid
  MOD_RES (340)..(373): Variable amino acid
MASLFLLSLVVSLRRLCCVLPLWSLSSLFGLSPVFLCVHCGPSGVLSPDALCFRLLLSFPSLVCALSCSLAPAVLLGLLLRCVPPPVFPLRLVLCVHCSCSVWSVSPWSSALLFCCPAAGVSNLLSSGRFACLCARCGSCGVPRGVLVSLLLRVFCCVSVFSRAFGSFPPRRPPGRSESVCVPAVVRPFAIRLSPRVGRFINQADTXGFPTGXRAVGAPLLLWVGSLVGLPGLSPLCFRLVCCVALWAVXVFSRGLALPLFRVWGSVPGVLLGSRLXVAGLPLXGVXGGFCLSGGGXAGVSCXVRGPVXAGFXAAPGSGPVGGXPXFVLVGXRFFFGXSXXXXXXXXXXXXXXXXXXXXXXXXXXXXXXXXXXAF

SEQ ID NO: 1883 - DNA, 1057 bp, Homo sapiens; identical to SEQ ID NO: 1749
  source
  (1)..(1057)
  CDS (201)..(857)

SEQ ID NO: 1884 - protein, 218 aa, Homo sapiens [sequence omitted]

SEQ ID NO: 1885 - DNA, 1222 bp, Homo sapiens
  source
  (1)..(1222)
  CDS (201)..(1022)
  modified_base (238)..(337): a, t, c, g, unknown or other
tacagtcttaggggtcgccacttggctcttagcaactagtcggtgcatggtcgggcatcactctgacttagcgatcctatgaggagtacgacgttccacagtacctaccccaccaggtcctagggtcatactatgaagtagattattctcggtataataatttaagggggtatttcatatatgtacgcttcatctattatatggtacttagtttcattactctgccttttttttcttnnnnnnnnnnnnnnnnnnnnnnnnnnnnnnnnnnnnnnnnnnnnnnnnnnnnnnnnnnnnnnnnnnnnnnnnnnnnnnnnnnnnnnnnnnnnnnnnnnnntgtttgctgtccttgttcttgtttccttctctctgctgctcttccgtgcctggttttcgtctttcggtcccgtcccgttctttatcttgtcctttggctgcggttgcgtggctttccgcttctggtgtctctgccgtttgttttctttcagtgtcgtgcctgtccgcggttgtttgcttgcgttcttgttctttttgtttttgtttttctgtgctctggtgcggtcttgcttggtgcgttggctccgctgctctttgtgtgtgtggtctggtgggtgtttgttcttggtttctttgtttggttttgtttgtgtgggtgggtttggttgtttttggtggctggccttcgtttctgtgttgtctggctttgtcttattgctttctgttttttctcatttgggttttctcttgtgtgggttgattggatggggggtcctgggttgtttttggttctgtgttgtgttttctgtgttggcctcgtgttttgttctgctcgtgtggggtcgctggtgaggtgtggttgtatctcagtgtgtgttctgtcgtgccggtcgcctcttccggggtgtgtggcttgggggtgcctgcgtgccttggtagtgggggtgcgtttttgtgttcgtccgttctgggtatcggccgggtatggtccccgttgttttgtatcaattgtgttccggtggtagtgctcagggtctgtggctagcgcacagggggtgcgtattgcttaggagctgggggtgcatggaaggtggtttagaacacaagggtggtctttgaggtaagggttacaagtggtagggaaggtagttactgggtggggttggggttaggtgttggtatggtatagacactgtccagtgtggttgtcagtggcataggggga

SEQ ID NO: 1886 - protein, 273 aa, Homo sapiens
  MOD_RES (13)..(46): Variable amino acid
MVLSFITLPFFSXXXXXXXXXXXXXXXXXXXXXXXXXXXXXXXXXXVCCPCSCFLLSAALPCLVFVFRSRPVLYLVLWLRLRGFPLLVSLPFVFFQCRACPRLFACVLVLFVFVFLCSGAVLLGALAPLLFVCVVWWVFVLGFFVWFCLCGWVWLFLVAGLRFCVVWLCLIAFCFFSFGFSLVWVDWMGGPGLFLVLCCVFCVGLVFCSARVGSLVRCGCISVCVLSCRSPLPGCVAWGCLRALVVGVRFCVRPFWVSAGYGPRCFVSIVFRW

SEQ ID NO: 1887 - DNA, 1678 bp, Homo sapiens
  source
  (1)..(1678)
  CDS (201)..(1478)
gccccaggtctggtattggtggagttgtccccaggtctggtcattggtggagttgtccccaggtctggtcatggtgcagtgccccaggtctggtatggtggagttgtccccaggtctggtcatggtggagtgtccccaggcctggtcatggtggagttgtccccaggcctggtcatggtggagtgtccccaggcctggtcatgggtggagttgtcccaggtctggtcattgggtggagttgtcccaggctggtcattggtggagttgccccaggtctggtcattggtggagtgtcccaggtctggtcattggtggagtgtcccaggctggtcataggggagttgccccaggtctggtcattggtggagttgtcccaggactggtcattggtgcagttgtcccaggcctggtcattggtgcagttgtccccaggcctggtcattggtgcagttgtcccaggctggtcattggtggagttgcccaggtctggtcattggtgcagttgccccaggtctggtcattggtggagttgccccaggtctggtcatggtggagttgccccaggcctggtcatggtggagttgccccaggcctggtcattggtggagttgccccaggtctggtcattggtggagttgtccccaggtctggtattggtggagttgtccccaggtctggtattggtggagttgtccccaggcctggtcattggtggagttgtccccaggcctggtcattggtggagttgccccaggcctggtcattggtggagttgtccccaggtctggtcattggtggagttgtccccaggtctgggtattggtggacttgccccaggtctggttattggtggacttgccccaggtctggtcattggtggagttggtcccaggtctggtcattggtggagttgtcccaggtctggtcattggtgcagttgccccaggtctggtcattggtggagttgccccaggtctggtcattggtggactttccccaggtctggtcattggtggagttgccccaggcctggtcattggtggacttgccgcaggtctggtcattggtggagttgtccccaggtctggtcattggtggagttgtccccaggcctggtcattggtggagttgccccaggtctggtcattggtggagttgtcccaggtctggtcattggtggagttgtccgaggtctggtattggtggagttgtccccaggcctggttattggtggagttgccccaggtctggtattggtggagttgtccgaggtctggtattggtggagttgccccaggctggtcattggtggagttgcccaggctggtcattggtggacttgccccaggctggtcattggtggagttgtccgaggtctggtattggtggagttgccccaggtctggtattggtggagttgccccagttctggtattggtggagttgccccaggtctggtcattggtggacttgcctagggctggtcattggtggacttgcctagtgctggtcattggtggacttgccccaggtctggtcattggtggagttgccccaggtctggtcattggtggacttgccccaggctggtcattggtgtacttgccccaggtctggtcattggtggagttgccccagtctggtcattggtggagttgtcccaggctggtgattggtg

SEQ ID NO: 1888 - protein, 425 aa, Homo sapiens
MGGVVPGLVIGWSCPRLVIGGVAPGLVIGGVSQVWSLVECPRLVIGELPQVWSLVELSQDWSLVQLSQAWSLVQLSPGLVIGAVVPGWSLVELPRSGHWCSCPRSGHWWSCPRSGHGGVAPGLVMVELPQAWSLVELPQVWSLVELSPGLVLVELSPGLVLVELSPGLVIGGVVPRPGHWWSCPRPGHWWSCPQVWSLVELSPGLGIGGLAPGLVIGGLAPGLVIGGVGPRSGHWWSCPRSGHWCSCPRSGHWWSCPRSGHWWTFPRSGHWWSCPRPGHWWTCRRSGHWWSCPQVWSLVELSPGLVIGGVAPGLVIGGVVPGLVIGGVVRGLVLVELSPGLVIGGVAPGLVLVELSEVWYWWSCPRLVIGGVAQAGHWWTCPRLVIGGVVRGLVLVELPQVWYWWSCPSSGIGGVAPGLVIGGLA

SEQ ID NO: 1889 - DNA, 1084 bp, Homo sapiens
  source
  (1)..(1084)
  CDS (201)..(884)
ttctcttttccttctgttcttggatgctctgccttcccctccctgctgtgtgtacatgtgcgtgtgtgtgtgtgtgtgggcatgcacgtgtgtgcacgtgtatgtgtgtgtgtgtgcatgcgcctgtgtatgtgtgtgggcacgtatgtgcttgtgcatgtgtgtgattagcgtgtttgcgtgtgtgggcatgcacgtgcatgtgcatatgtgtgtgtgggggcgtgtgtgtgcgcgtgtgtgtgtgtacgtgtgtgtgcatgtgtgtgtgggcatgcacgtgtttgtgcttgtatgtgcatacatgtgtgggtgggtgtgtgcacgtgcgtgtgtgtgcctgtttgtgcacgtgtgcatgtatgcgcatcgggtcttgcacgtgcacctgtgactgtgcatatgcatgcatatgtatgtttgtgcacgtttgtacatgtgcgtgcatgtgtgtgcgtacgtacgtgtgtgcatgtgtgggcgtgcacgtgcatggtgtgtacttgtgtgtgcatgcacatatgtatttgtgtgtggacatgcacatatatgtgggtgtgtggatatgtgtgcatgtgcatgtgtgggcatgcacatgcatgtgcatatatgcgtgtgtgggcgtgcatgtgtgtatgcatgtgtgtgggcgtgcacatgcatgtgcatatatgtgcgtgtgtgggtgtgcatgtgtgtgcctgtgtgtgcatatgtgtgtgcgtgtgtgggcatgcacgtgcgtgtgcgggtgtgcatgtgcgtgtgcatgtgtgtgcacaagtttgtgcatgtgtggtgtgcatgtgagtgcatgtttgtgcatgtgtgggtgtgcgtgtgtgggcgtgcacgtgcgtgcatgtgtgtgtgttggttattaggtattgatctattctcatgttcactgaccctttcctccactgtgttgcgtctactgccccatcaaaagcatttttcatctctgtagcctggtttgacgtctttccatctggttctttcttatcgtttccatctccctgaggaaattactcatctcatcttgtacatcgtctacgttttccgttagagcccttaacatact

SEQ ID NO: 1890 - protein, 227 aa, Homo sapiens
MCICVCGGVCVRVCVCTCVCMCVWACTCLCLYVHTCVGGCVHVRVCACLCTCACMRIGSCTCTCDCAYACICMFVHVCTCACMCVRTYVCACVGVHVHGVYLCVHAHMYLCVDMHIYVGVWICVHVHVWACTCMCIYACVGVHVCMHVCGRAHACAYMCVCGCACVCLCVHMCVRVWACTCVCGCACACACVCTSLCMCGVHVSACLCMCGCACVGVHVRACVCVGY

SEQ ID NO: 1891 - DNA, 1372 bp, Homo sapiens
  source
  (1)..(1372)
  CDS (201)..(1172)
gtttctgcttgggaaccccctcctcaactgatacatcttgaaggcagagactacatttcggaaatcagggtgtgctgggtgtttatttctcagtgtgtccatatgtaaaatggggtgatagtagtcccagcctaagggcattgtggggacctagtgaggtgctctgtgtctcgagtttggtacattcccaggcatgtggtatgggccaagtaagcaagaactgccatcatcatcattatgccatcaccaccattgctgccatcatcaccatcactgccatcatcatcaccatcagtcccatcaccaccatcatgaccatcactgccatcatcaccatcagagccatcatcaccattggtgctatcatcatcaccatcgctgccatcatcaccattgctgccatcatcgtcaccatcggaggcatcaccattgctgccatcatcgtcaccattggtgccatcatcaccattgctgccatcatcaccatcactgccatcatcaccatcactgccatcatcatcaccatcggaggcatcaccattggtgccatcatcatcactatcagtgagatcatcatcaacattgctgccatcatcaccatcagagccattattaccatcagtgccatcatcgccaccataggtaccatcatcatcaccatcagagccatcaccattggtgctgccatcatcaccatcgctgctatcatcaccatcactgccatcttcaccattgctgccatcatcatcaccattggagccatcaccatcgttgccatcatcatcaccatcagagccatcatcaccatcagagtcatcatcatcaacactggagccatcatcaccatcagagtcatcatcttcaccaccggagccatcatcaccattgaagccatcaccatcagtgccatcatcatcaccatcagagtcatcatcatcaacactggagccatcatcaccatcagagccatcatcaccatcggtgccatcatcggtgccttcatcaccattggtaccatcatcatcagtgccatcactatctctcttatcaccattgctgccatcatcatcatctctgtcatcatcaccatcactgccaccatcatcatcatcactgccaatatcatatgcgttattattatcctttaccttagtccacctttattactttaaaggacaacctgaggctgggtaatttataaggaaaggaggtttaatcggctcacggttctgcaggctacacaggaagtatggcatgggcatctgcttctggcgagggcctcaggaagcttccactcatggcagaaggcaaaggagaccataggtgtgcagatcacgtggtgagagaggaggtgggagagttggaggtgcca

SEQ ID NO: 1892 - protein, 323 aa, Homo sapiens [sequence omitted]

SEQ ID NO: 1893 - DNA, 1300 bp, Homo sapiens
  source
  (1)..(1300)
  CDS (201)..(1100)
  modified_base (869)..(968): a, t, c, g, unknown or other
aatggtgccactgcactcctgcctaggcgacagagcaagactctgtgtcaaaaacaaacaaacaaacaaaaatggcaaagtatgatcttccaggtatattccactggaaaagggaagaaagcctcagatgggcatgcataccaactctttattcacactgcgtgtgtgcacagttataaaaggtaaggaagacactgcgcatgtgggctgccccaagggaagaatcgtgggaaagaggtgagcctaggatccaggttaaacgcctcgtttttgctgttttcttttgctctctattctctcttggaccttcaggtgcccgttcggcgctctgtgcctcttccccgttgccgggctcgccttccttctgtgtggccttcccccgctggcctctcctgctctcgcccttttctctccttctcttctctcttttttcttcccggcctctgccctctccttctccgccggggccccgccccttttcggcgcgggctgccgcgcgctttcttttttcttcgtgtccttgtgcgctcttctccgtttgttccgctgcctcccttgctctttttgttcctgttgttgcttctctttttctcccttctcttctctgtgccttgtccgtctcccctgcttctttttgttttcgtgttcctgctttcgcctgcggggcctggtcggccgccgtcgcggttgtggtgtttggtggtcgtgtgccttgtgttgggtgtcgggctcgcgtgggtcgcccgggggttcggtggtgtgttggcccgggttcttctgtcgctgcggtcgctcctctctgggtgttgttgctcgtcccgttcggtgggcgggtttgctgttcgtctgagacaagaagacaaaagaannnnnnnnnnnnnnnnnnnnnnnnnnnnnnnnnnnnnnnnnnnnnnnnnnnnnnnnnnnnnnnnnnnnnnnnnnnnnnnnnnnnnnnnnnnnnnnnnnnnatgtatcaatatatatggttttttatatcccatatgtatatatattttttatatatatatattatatatatgaatgtattaagtttaactcacatgatcacaaggtcccacaataggccatctgcaagctgaggagcaaggagagccagtccaagtcccaaaactgaaaagcttggggtccgatgttccaggacaggaagcatccagcgcagggtaggctggggaggctaggctagtctagtcttttcacgtttttctgcctgctttatattctagccgtgctgacagctgattagattatgcccaccaaattaatggtgggtctgctttcc

SEQ ID NO: 1894 - protein, 299 aa, Homo sapiens
  MOD_RES (223)..(256): Variable amino acid
MWAAPREESWERGEPRIQVKRLVFAVFFCSLFSLGPSGARSALCASSPLPGSPSFCVAFPRWPLLLSPFSLLLFSLFSSRPLPSPSPPGPRPFSARAAARFLFSSCPCALFSVCSAASLALFVPVVASLFLPSLLCALSVSPASFCFRVPAFACGAWSAAVAVVVFGGRVPCVGCRARVGRPGVRWCVGPGSSVAAVAPLWVLLLVPFGGRVCCSSETRRQKXXXXXXXXXXXXXXXXXXXXXXXXXXXXXXXXXXMYQYIWFFISHMYIYFLYIYIIYMNVLSLTHMITRSHNRPSAS

SEQ ID NO: 1895 - DNA, 1480 bp, Homo sapiens
  source
  (1)..(1480)
  CDS (201)..(1280)
ctgtcaagatgaaaagagttctggagatagatgggatatactgaatgccactaaactgtacacttcgaaatggttaagatggtaaattttatgttatatatattttaccataataaaaaaattggttggagagaagatgttggtcataaaattccacttacggatattttaggttagttctcatttttcactattgtaagatgcaccttcacatatgtatctttacacatgaatccacatttttcttgggaactctcaaagatggaattgctggatcacaaagtatgtacaattgtaattctgatacatattacaaatcatttctatatgtatctttgtatatcaacttttgtcatattacaaatcatttctatctgtatctctgtatatcgacttttgtcatattacaaatcatttctatctgtatctctgtatatcgacttttgtcatattacaaatcatttctatctgtatctctgtatatcgacttttgtcatattacaaatcatttctgtctatatctctgtatatcgacttttgtcatattacaaatcatttctatctgtatctctgtatatcgacttttgtcatattacaaatcatttctatctgtatctctgtatatcgacttttgtcatattacaaatcatttctatctgtatctctgtatatcgacttttgtcatattacaaatcatttctatctgtatctctgtatatcgacttttgtcatattacaaatcatttctatctgtatctctgtatatcgacttttgtcatattacaaatcatttctatctgtatctctgtatatcgacttttgtcatattacaaatcatttctatctgtatctctgtatatcgacttttgtcatattacaaatcatttctatctgtatctctgtatatcgacttttgtcatattacaaatcatttctatctgtatctctgtatatcgacttgtcgtattacaaatcatttctatctgtatctctgtatatcgacttttgtcttattacaaatcatttctatctgtatctctgtatatcgacttttgtcatattacaaatcatttctatctgtatctctgtatatcgacttgtcatattacaaatcatttctatatgtatctctgtatatcgacttttgtcatattacaaatcatttctatatgtatctctgtatatcgacttttgtcatattacaaatcatttctatctgtatctctgtatatcgacttgtcatattacaaatcatttctatctgtatctttgtatattgacttttgtcatattacaaatcatttctatctgtatctttgtatatcgacttttatcatattacaaatcatttctatctgtatctttgtatatcgacttttgtcatattacaaatcatttctatatgtatctttgtatatcgacttttgtcatattacaaatcatttctatctgtgtctttgtatatcaacttttgtgactc

SEQ ID NO: 1896 - protein, 359 aa, Homo sapiens
MHLHICIFTHESTFFLGTLKDGIAGSQSMYNCNSDTYYKSFLYVSLYINFCHITNHFYLYLCISTFVILQIISICISVYRLLSYYKSFLSVSLYIDFCHITNHFCLYLCISTFVILQIISICISVYRLLSYYKSFLSVSLYIDFCHITNHFYLYLCISTFVILQIISICISVYRLLSYYKSFLSVSLYIDFCHITNHFYLYLCISTFVILQIISICISVYRLLSYYKSFLSVSLYIDFCHITNHFYLYLCISTCRITNHFYLYLCISTFVLLQIISICISVYRLLSYYKSFLSVSLYIDLSYYKSFLYVSLYIDFCHITNHFYMYLCISTFVILQIISICISVYRLVILQIISICIFVY

SEQ ID NO: 1897 - DNA, 16270 bp, Homo sapiens
  source
  (1)..(16270)
  CDS (201)..(286)
  CDS (2151)..(2281)
  CDS (6751)..(7016)
  CDS (7054)..(7698)
  CDS (15900)..(16070)
ggagagaaggacacagacacacacagagagacagccatgtaaagacactggaggaaattgaccatctacaagccaaagagagaggcctcaaaaggaaccaaccctgcccataccttgatcttggatttctagccccaggaccctgagaagagaaattcctgttattgaagttgatgatctgtggtcctttgttatggcagcccaagctgatcaaagataactggctgctcattccaggggagccaaatcccgtgaagacagagccttatagtgatacagtgacaatgtggaaagctttcgtgaggccagaacgaactgcattcgttcattcatttatttttcttgcagttcatctttaaatactggatgaacattgttctcagcatggggaatacaaggctgcaaagtctgtggcacacaccgtgggggtgtcagttaggtgagaggcagtccccaaaacagtgacaacgctgggctcagtgctttgaccagagtgtcccagagcaatgagggagcacaaaggagggcatttcggcagcttggggtgagagtcaatttctgccagagaaggtcccagaaccgtttgtgagagagggaggagcacagggttagtgggtcagaggccactggaagagggtgtctttgggacatgcagtctttcctcacagtggggtagcgggaggatgtgtgggcacaggctggatccctgtttggtgtagggcttgtaagcttgcactctggtcagattgcatgactctggctctgaccacagctgtgtgacttcaggaaaattatttaacttctctgggcctcatgggtcttacttgcaaggtgaggacaatcacagtacctacttcatgggctcgttgtagagattaaaggcacatgtgtatgaaaagcacttggcacagggctaggtgtgcagcaaattcttggtcaaggctgaccaccacctaggggcttgggcttcacctcaagggcagtggggagccactgaaggctttaggcagaagaatgactgggacagatatgaattttcaaaatatccctcttagttggtgggttggagatcctagctttctaatttaaggccttttattggccaggcaagtcaatgaattaataattctatacctgttggacacttaccatgtgcttttgctacattagatgactggcgaatggaaaaaagtatatataacaattaggcgctgttctaaaaaacagagcatttattttaaaattgtggcaaatactgaaaaacccgtagatatcaggatgaaatcgcttttgtcagacccaggcaaaataggcctgggaaagcgctaaggagagggcacttctgtctacgtgtctgagatacaaagtgtttccaaagactttctaaaaacccttcatgcatctcctgctttgaagaggttggacattactagacattcattaggactgcagtaaagcagataagatgctcttggaagaacacttgtccagcactggcatctccaccaatgaactgatgacaactctggctttgagcctctagaaccgatgaactttttttctctgtggattatgtaaatctctctttgctaataacagctcctccttacccttccctcaccgaatgcgctggtggcttgccattccatgcattctggactgtaattcctatttccaagtaaatccaacatatttagcgataattttctctaatgtctttttttttcaggttgacaatcacataacatttaccatcttagtcattttaagcatatggttcattaatgttaagtacattcacttgttgtacaaccaatctgcaaacgtttttcatcttgcaaaactgaaactctgagcccactaaacaactctctatttcctcctcctctggcttttggcaaactctgttctactttctgtctttatgagtttgaatattctagatgcctcgtataaattgaaccatacagtattggtcttcttgtgtctggcttatttctcacagcataacgttctcaagggtcatccatgatgtagccagaatcatggctgagaaggagccgtgtatttgtgtgcacatgtctgtctcaccctatggtgcctgaggctctcccagggctgcttgagaactgagtccttgtgtttttcaggtttggggtgatccacttggtgttcaccaacctgcttctgtgggccaacggcgtcctcaatgagtcaaagcaccaactcaatgagcacaaggaatggctcatcactctgggctttgggaacataacaacaggtgagtgctgagagaggtgagtggcccctctgccatgttggaatgtcttggaaacctgcagagtccacagtgttcagagatggagtgcaggttccaaagaacttcaggcccaccaaagtcagcatcagccagacagccccctgttgttgaaaatcttccaaaacctgaatctctcataagtgatgtgtactgagcataattaaggtttcttccatgactcagggacttgtaagacccacggtgatcattctgatggccatttctcatggtccagtttgccgcagaaataaatgtctttgttttcaactacagaagattgatggttgcctctgcttgtgtttttaattaaacctctattaccagttctttctagtaaaagtatggcttttaaaaattcataaaagtctaatggtaggttgtggttaataggctgtggttcatttaaagttttaatttaactgtagttggcttataattctagctcatgtctgttctaacttgttcctatttgagagcctgttgggttaatctttatattttcatctaaaatcctttagcatttacaatatgtcacttctatatgagaacattcaggctgaggggaatgtggggcagggaactgggtgtctcaggtttgttcccatcatgtacaagctgtgtgacctttagaagacttttaatctctctgagcctcccttttctcatttgtaaagtgagggtatccaaatcatgcacttgcaaagatcccttccagctttaacatgcagcaagtctgtgacagctgtgtgaacccaggctgtcctggagagccactttgaacctgttttgtcatcagtggggtggagacaatgaagtcaccacccccaaccagcaggcactcggtgtttgggcctcatgtcctctttggtatcaatattagtagcagcaatgacaacaataacaaaagtaaatttttattaagcatttgctgagtgcctgccactgttgttggaaatttacacatgtcatttaatttgtacccccacactctctggtaggctatatatgtgtgtatatgtatgtgtatatatatatatatatatatatatatatatatatatattgttgtttgtttgtttgttttgagacagagtctcactctgtcgcctaagctggagtacagtagcgtgatctcggctcactgcaacctctgcctcccatgttcaagtgattctcctgcctcagcttcctgagtagctgggactacaggtgcgtgccaccatacctggctaatttttgtatttttaatagagacggggtttcactatgttggccaggctggtctccaactcctggccttgtgatccgccagccttggcctcccaaactgttgggattacaggcgtgagccactgcgcctggcctcaggtagacaatattaacctcattatatggatgaaggcatcaagccacggagaagttagcccagggtaacacagtgaacatgtgatacagccatgatttgaatcctaacaatctggcttcaaggccctctgtgaaagatgaggttggattaattttctaaaaaaggactctgtcagctgtaacattctgttactctgaacttttcctcctgatttcttcccttgtcttctgcataacaccgtattgaattgtaagtgctagggaagccctgtgtgaattgaagattattactggggcagtgactcacacctgtaatctgagcactttgtaatcctaaggcaggagcattgctttagcctaggaatttgagaccagcctgggcaacaaagggagaccccagctctggaaaaaaaaaaaaaaaagccaggcatggtggcatgggctcgtggtcccagctatagctacatgggagactgatgcaggaggatcacttgagcccaagaagtcaaggctgcagtgagctgtgtttgtgccactgcactccagcctgggcaacagagggagaccctatataaaaaagaataaaaaaagaaaaagaaaatttcatagtgttctgtgaaagtaaaattaatgctacgatatagtttttctcagattttttttttttttagacggagtctcgcttgtcgcccaggctggagtgcagtggcatggtctcggatcattgcaagctctgcctcccgggggtcacactcttctcctgcctcagcctcctgagtagctgggactacaggcgcccaccatcacgcctggctaattttttgtatttttagtagagacagggtttcaccatgttagccaggatggtctcaatctcctgaccttgtgatctacctgcctcggccttccaaagtgctgggattacaggcatgagccaccacacccagctgcttttctcagattttgtaagtaatatatacatatcataaactaaaacaatgacaaagtgtgaagcaaaaaaatccacaacacttacccagaaatgcagtaagtgctgcgaatgtttggttatttttttgtagtgtgccatttatttatagttgattttatactatatatttgatctttttttattgcaaccttcaataagagacagattttacactgtaatccaaacacacacatacttatgtgtgtatgcttgatgaaataatacttaattttactgtatcagagatgcttccaaattttatcggagttgattccactccattctatcccattctagtccactgaaaattatttctgctacaaaaaagttggttgctacctgattttgcagccttgtactgggttgtgacttgcattaaagaaatatacagtttgttcttacttttttccattttccttgaaacgagattactttcttaatattaaaacacatcctggctgggtgcagtggctcatgcctttaatcccagaacttcgggaggctgaggcgggcagatcgcatgagctcaggagttcaagaccagcctagccaacatggcggaacgttgtctctacaaaaaatataaaaattagctgggagtggtggcatgggcctgtggtcccagctactcagcaggctgaagtaggaggatgcttgagcacagaaggctgatgttgcagtgagccaagattgtgccacagcactccagcctgggcaacagaggaggctctgtctcaaaacaaacaaaaaacaaaccccccccccatacccaaaaccataaagcacatcttaattataacgtgcagtggctgtctactatctcattgttgggatatactaaaatttacttaacaatttctaaattgttggactttgagctgttcctctctctctctctctctctctctctctctgtctctctctctctctctcacacacacacacacacaaacacacacaattttacctgactttttttaaattattttttgagactgagtctcactctgtcacctaggctggagtgcagcggtgcgatctcagctgactgcaacctctgcctcccaggctcaagcgattcttctgcctcagcctccccagtagctggtattacaggcttgccaccacacctggctaatttttgtagttttaatagagatgaggtttcaccatgttggccaggctggtctcgaactcccgacctcaagtgacccacatgccttggcctcccaaagtgctgggattacagggctgagtcaccactcctggccttacctgactctttgattacatttttatttgtccctttgagtagaagggtagaatggaaagaatggaattatgggtcagagactgcatcgccttcagggctttggtgacctgtttcgtcatttacttgcagcatctgccctcctgtgatgagagggccctccatatgacagccagcttctcttccagaaggtggtgcccgtttactttccccgcactgatatcagagagcacctgtctcctgcatgcttgctagcactggagtcttaagaggcatatcttttgctaattaaaaggggcattttctccagaaagtattttttaaaaataatcttaaaaaatcacacatgtaaatcatcttcacagaaaaaatttagaaaatacagggaagcaaaatctagaagaggttaaaaatcatctgtcatttttccacccagagataacaattgttgacattttagtttgtgtccttccaggttttttctgtctgtctgtgtgtgtgtgtatccatctatctatctatcatctacatatctattttttacaacaatagagtcatcttctctatcctctttggcaactcaccaaataaatgtgatttaggtaatgaatatgctttggggatactcagggctatcaaattagccatcatattaaacgtgataataagccatgacatgaaaaagcttgtaatccagtgggaagactcaagcctgaatccacagtggaaacagttttctgtgcttttctgcttccccttgcacctgctaatagcccctctgtgtgatcaacctgtctcccctagttttagatgaccacacaccgcagtgtaactgcacgcccccaactctctgcaccaccatctcccacgggatctactataactactacctctaccccttcaacatagagtatcagatcctggcctccacagtgctctacgtcctatggaagaacatcgggcgcaaagttgacagccatcagcaccagaagatgcagttcaagcctgatggggtcacggtgggcacagtcctgggcctgaccgcgctggctgccaccattgccgtggtggtgggtggtgcacctgattcatattgggtgctccaagaccaagagcgagtcagcactcatcacgttctacctgtatgtcatcaccctgatgatgcttatgggggctgcggggctggctggaatccggatttacaggacagatgagaagtcactggatgagtccaaaaatccgccccgcaaactggactcggacctcttggtgggcactgcctcaggctcctggcttatctcctggggctcaatcttggccatcctttgtgccgaggaccacccccactacacctggtacaacctgccctactccatcgtggtgatcatggagaagtacatccagaacctcttcatctttgaatccattcaccgagagcctaaaaaactctctgaggacatccaaacccttcggatggtcacagtctgcaatggcaacaccatgtcccttgcttcctcctgcctcaagagtggagttgtggccggagacgtggctccctggggcagggacatgccaccagcagccaatggaaatgtgtgcctgagagaaagttgtgacaaggaggagaagcaggaggagagcagctggggagggaacccaagcccagtccaccttcctcgtttcttacagggcaacgccaagagaaaagtcctgaggaatattgcagccttcttgttcctctgcaatactttggtaatctgcaccaagttattcttattcttttaattttgctgtaaactttcattttaggttcaaggggtacgcatgcagatttgttacatgggtaaattgcgtgtcgctgaggtttggtgcacaaatgatcccgtcacccaggtaatgagcatagtacccgataggtagtttttcaccctgcaccccacttctgacctctccccctagtagtccctagtagtgtctattgttcatatatttgtgttcatgactaccattagctcccacttataagagaggacatgaggtatttggttttctgttcctgtgttaattcacttaggataaggactccatttctatccaggttgctgcaaataatgtgatttcattcttttttaaggctgcataatattccatggtgtagagctaccacattttctattttttttttttttgagagagggtcacgccccattgcccaggctggagtgcagtggcatgatcacagctcactgcagcttcgacctcctgtgctcaagcaatcctcccatctcagcctcctgagtacctgggaccacaggcatgtgccactacacctggttaattttaaaaactttttttgtttttgagacagagtttcactcttgttgcctaggctacagtgcaatggtgctcactgcaacctctgcctcctgagttgaagtgattctcttgcctcagcctccagaatagctgggattacaggcacctgccaccacagttggctaatttttgaaaatatttttagtagagatgggggtttcaccatgttggccaagctggtttcggactcctgacctcaagtgatccacctaccttgacctcccaaaatgctaggattacaggtgtgagccaccatgcctggccaaaactttttttttttttttttgtagagataggttctcactgtgctgcccaggcttgtcttgaactcctgcgctcaaacaatcctcctgcctcagcttcctaaagtgctagtattacagatgtgaaccactgtacccggccataatacattttctttatccagtccattattgatggacatctaggtttctcttgcctttttaaaataaggaatggaggcagcttgtaataaaaatactgtaagtataaaattacaatataaggctggaaaatagacctatattctacaaatctacctactgaagacttgctgtgtgctaggggctgggctaggtactaaagattaaagtggaaagactcagtctctttcctctaaaaggtctcagtataatgggggagggagacaatgagcaaatctaatatagtgaacaggacaagtgctgagatgggcttgtgcaaggtgtactaggagcagggatccagaaggacttcagtgagtagtgagtgcttgaggtgaggcccagtgtcaatcaggagtgcttttagttgcaagtgacaggcaatttgattcacagtgtcttcagtcttatcaatgtttaattatctcctgagaattccagaggttggctgcttggggttggcctggcagctgaaccgtgtcatcaggcatccaggcactgttcatcttgtcacttgggtcgtgtggtgtttgttgcgacatggtcatgagatggctgcagctgcaccaggcatcacatctgggttcaagacagaaagcagtggggaagggctggtgccagacaatgtctctcatgtgggcacccctcactgcaagggaggctggggaagtggacggtttgcttcccagcctctctgatggaaggtagcaagggagaggaaggtgtacagtcactcacccatctgtctgcatcagcaaggaatgactggaagttcaccaggttatcaaggcggggaaaagcatttcaggcagagacacacaatatgtgaagacacagaggcaaaagacaccatggcatgttttgagagcaccaagtagtttggcataaattccatgtgtgttaagcagagtagcagaatgggaaataggagagagggcccaggtaggtggactctggcttgagcagggcttcctaggcctggctggagtctagtctttatgctgagggcaagggaagactctctcagatttgtgttttggaatgatcctcccagtagctgtgtgtagcaaggatggagacagatagggccagaagcagaaagactgggagagaaagccctgcaacagcccaggcaggaaggggaggagcttgaactagggcagtgatggagggatggagagaagaaaaaggaataagaagcattgtgtgctgttgggatttttttaaagacacataaaggaaggatggtgggggtcagtaagaaggagggggaagcagcctttgccaccgcatgagtctctgcagtgatggtgactggtggctggaggggagtgccccagtccacagaggtgcctgcccatcactctgggtgaagtcagctctgtgctactagcctctgttatcaagcctgctccctgttgccccagcagctcagaggcttttgagcttcctcccctgaatttcagatggtgcatatggggcctgcagcttttgatatcaccctaagaacacaaagttgggaaagtaagtcccttctaaagtcagaatggctgtgtgtctgccaagcaaacctgatccaccctagccttggatcacccaggttccttcagtttgctaggcagtgaggaggggctctgaaggtggaaggcccagaagagtttggctgcagggagaccctcttctccatctaacagacatttgccaggcacctgctgtatgccagggactatgtcaggggcacagcagtgagtcaaaaattgaaagagttaacaagagagatagatactgtaagctgcatttttttgaggtgcatattccaaaatgcaaattcttataaagtcagagctagttctagaatcttcctcaagtatatgctttttgtacatatcctgtgattaatattaatatacatatattttgagatggagtcctgctgtgttgcccaggctgtagtgcaatgatgcgatctcggctcactgcaacctccacctcctgggtttaagtgattctcctgcctcagcctcccgaggaggtgggactacaggcatgcaacaaccatgcccagctaatttttctacttttagtagagacagggtttcactaggttggtcagggtggtctcgaactcctgacctcaggtgatctgcctgcctaggcctcctaaaatgctgggattacaggcgcgagccactgcttctgacctaatatttctttttaaaactaagttctgaaaagttgtctttccctggttgcctttttggttgaccactgggtgaaatacttggcttgcatttttggacccacttgaagaaagatagcactgtctgaaataccagaatcaagtggcaattcatggtctgtcaggacccgaaagccagacccagggcccagtccaaggagaagggtgggctccgtctcttcctccctgtgcttggcccatgatgcccccaggcactggttgggttctggggggttgaaccagaggatggaaatcatcgcagggtggagtcttaggatacccgtgctggctcatggggtggcactttgaaaccttgtggttgaccccaggtggtgccaaaggcatctggcagagagcaagagctgtcttctccagcatcgggagccagtccagaggccccagctgcaggtgctgatgtgcatgtccaggtggagtgggctccactccagagacggacatggaaatgttagttgaatttccaggagccgtggcactggagacaacagagggtggttgtggtgacggggaagggcagggtgctgtgggagatgggtcagggaaggcctcttctaaggaagggtgtggatggggctgggatgagagactatcagggcagagctgcaggtgtggggaagggacggatgcaaggcaaggcagggctcactggacatgacctgggagcacagagcagagggcagaggggagaccacacagggcctgcgagccaagactcaatcttaaatgcaacagaaaaccatggaaaggtctacactgagagtgacgggatctgactcatgcttattttgttatatttttaattgtggtaaaaaactcatcacataaacttttccattgcactcactttcaaatgtatagtggagtaaagtacgttcacattgtgcaaacatcacaccatccatttccaggttattctcatctggcaaaactgaaactctgtccccattaaatatgaactccccattctccccagcccctgacaaccaccgttctttcagtctctaggaatttgactcctagactcctcatataagtgaatttgtggagtattagtccttttgtgattaggttatttcactcatcataacaccctccagggtctccaggttgcaactcgcaaagggtgacagatgccaaacatgacccctgccttcacacttgagttcctggggagatggtgatactatgttggagatggaggactctggaggaggggcaaccttgggagcagtgggtggaggtcagtgtggaaggaagaaccagagttaagtaatgaacgtgttctgtttcaggtgcctctgtggcatccaaatggacgaacccagtagacaggtattttggttttctattgccgtgcgatgaactaccactaatgtatgacaaaagcaacatgcatgactgtttttgtcccatggcatttattgtgactcatggctttgtgggttagaaattctggcagggcttggatgggcagttctgttcctcacagcatcaagtgaagttggtgaagccttggccagaagcttcgtggtctgatgccttgggtgggggtggctgggaggctgggctcagccaggactcttgactggggcatccacaggtgggtctccagcatgacgtctcagggtggttggactccatgcgtgatggctgagggccccagagctgaccctccaaaagactgaactggaagctgcctgtctcctaaggcctgggcttggaaactgcatggtgtcatttctgccatattttattagtcatgtagtcacagagtccatctagattcaaagaaagaggtcataggccacttctcaataggataagtaacaagaatttccagccaactaaacagcacatataaagatgtggatttcagaaaagaggtcccattttcctgccttcctttcttctcccttttcctccctgtctcccttgcccttcctctcacccttcttttaaaaggtgtcccttaagtacctacagaggtacagggactgctatgaatggtgagggtacagcaatgaccaagatctctggtcttcctcttatggggcttacaaaccaggcaacagcaggtgaaaccatcaactgagcaagaaagacaccttatagtgtacccgtgttaagcagagaagtggaaaaggagggtgtgggaaatagctcttgggctgccattgtagatcagatggaccagcttagcgggaaggcctcgctgaagggtgacatgagacaggaaggggttggccacgcatgttcagggcagagggaacaacggctggtataaacccccagtgggagtgagcgggtctggtttgagaaacaggaagaagggttgcctgcaatgtgggtggggtgagtggggagaagcgtgggtggttagaaatcagctaacagagcactttatcactcagtgcgggagtgtagaatttattttaaatattttgggaagactttaggggtttaatcaaggtagggacaggatctgatttccatataatgtaaatctggtggccgagtggaaccctagttcgagctgggagaccaggcacggggccaccgccatggtccaggtgagagaggccggctggacaggtggagagagagagccacaggtgggctgaagatactgctttggaggtgcacagtggagatgcgctgagggactggatgggagagggcatggttatgagagtaggagggagataaggttgacacctggagcctcgatggaccacctgggaggacgatgtagctgagcagatggagaaatggggaaggtgggttgagtttgagatgtgttttagacacccaagttgccaccggaaactatgagtctggggttcttggaagtggtccaggctggagattgagactgggaagtcataggcctatagctggtatttacaaccagggactgggagagagccccagggttcatgtgtagagagaatagaaagggacccaggaatgagccctggatgctggctaacattaagaggcagagcaaaggatgaaacagcaaaggagactgggagggacccgccgaacaagtaggagagctcctaagagtcacagcagccagtaagcaaagcagaagagaggggtcttggttccagggcccccgtggtgtataccaaatgcacagatgctcaagtcctatatataaaatggggtaatacttgcatgtaacctacccatcctcccgtacactttaagacatctctagattacttagaatacctaatacaatttaaatgctatgtaaatagttgttacattgtattgttcagagaataatgacaagaagaaagtttgtacctattcagtacagacacaacaaaccattttatttttttaattaatttatttttattttttgagaccgagcttcactgttgcccaggctggagtgcagtggcatgatcttggcttactgcaagcttcgcctcctgggttcaggggattctcctgcctcagccccctgagtagctgggattacaggcacatgccgctacaccttgctaattttttgcatttttagtagagatggggtttcaccatgttggccaggctggccttgaactcctgacctcaggtgatccacctgcctcggcctcccaaagttctgggattataggtgtgaaccactgtgcccagcctactttttgaatatttttgatctgtggttggttcaatccacagacacaggtccctggatacagaggtcggctgtatataccagggagtgttctgtatggagatacaaatgaaggctatgtgtctcagttacgtattgctatggaagagaccaccccaatactcagcaacttaaaacaatgtacatttatgatttcatagtttctctgacttatgaatccaactacagttttagctgagtatctctgcacagggccattcccaggctgaaactgttggctggggctgcattcatttcaaggcttgactttccgagaggtggcagaggatttgtttccaaatctactcatgtgactgttggcaggattcagctgtggcttgttgggctgagggtctgagttccttgctggctgttgacaggagtactccctgggccccttgccgcgtagggtgcttcgcagcatggcagctctgccacctgtctttcaggagaagatgagcaagagggataacaggtccttttgcaacctaatttcagaagtgacttcctgtgtcttttgccatattttgtgagttggaagtgagtcgttaggtgcatcccacactaaaggggtggggactccacaagagggtgactgcaggagctggggatcattgagggtcatcctagaggctgcctgccacagccagggagtggaggaagctgaagaagggtgcagcctgaagcaggagtgaggagcctgacaactcaaggggtggcagaaagggagagaactgggacagagaagagcctgagaagcagggaacagtgtgtaggttccgtgagcaacacaaacaaaagtcactgctttcagttttgcaaacttaattctcatctaagccctctcagacacgtgttagaattcccatctttcaaatgaggaaactgaggctgggcgagggctgtagagatggagagagttggatgggttcaaagagcgctcattagggatggattgcagggaagggtgggtgaggaagtgagcaggatcatggcagacatggatttggtggtttctgtggagatgggaaatgccacgaggtctccttattgttctgtcaggggtgactcagtccccgtgcatcagggtcagctcccatgaggcctgggacttgagtggggcctccatggtggcttggaagctgctccccaccacaggccattttctcttctcttgcagctttggatacctcccgcttttggctgtcgacctgagtatgacaacggattggaggagattgtctttggctttgaaccctggataattgtggtcaacctggccatgcctttttctattttctatggaatgcacgcagctgcctccctctttgaggtctattgtaagatatagtctggttccacaagagaccgaggagtgagctaacaagagttcattggagccaactgggaatggccaggttggacaaatattgcctgacaaacatgagaagggccaccttttgtctgcaaagattgtgcttcctgtgggctggaactgcccatcacctctgatgaatgtaaacaagttagatcaaaatccataaggtggct

SEQ ID NO: 1898 - protein, 432 aa, Homo sapiens
PKLIKDNWLLIPGEPNPVKTEPYSDTVTMFGVIHLVFTNLLLWANGVLNESKHQLNEHKEWLITLGFGNITTVLDDHTPQCNCTPPTLCTTISHGIYYNYYLYPFNIEYQILASTVLYVLWKNIGRKVDSHQHQKMQFKPDGVTVGTVLGLTALAATIAVVTKSESALITFYLYVITLMMLMGAAGLAGIRIYRTDEKSLDESKNPPRKLDSDLLVGTASGSWLISWGSILAILCAEDHPHYTWYNLPYSIVVIMEKYIQNLFIFESIHREPKKLSEDIQTLRMVTVCNGNTMSLASSCLKSGVVAGDVAPWGRDMPPAANGNVCLRESCDKEEKQEESSWGGNPSPVHLPRFLQGNAKRKVLRNIAAFLFLCNTLLWIPPAFGCRPEYDNGLEEIVFGFEPWIIVVNLAMPFSIFYGMHAAASLFEVYCKI

SEQ ID NO: 1899 - DNA, 1099 bp, Homo sapiens
  source
  (1)..(1099)
  CDS (201)..(899)
  modified_base (97)..(97): a, t, c, g, unknown or other
  modified_base (196)..(196): a, t, c, g, unknown or other
  modified_base (729)..(729): a, t, c, g, unknown or other
tctactagctcctctccctatgttatccatttacgctcttgatctttttgtcgcattactatatttataatattcatctcttcctcatatctgtttntcctcaacgttatgattcttgctaccttttatgcctctatccttgtcttctcctcttttatatcctcctatttcgctgttttcaattccttatcttagntcttatgctctttaatgctgagtttcattgtattctagtaaccttccttctctggctgtgctctttcttccttttatactcatttatcgtattctatcgattctcatccctcatgtgtggacttatccttcgtttaacttgtaatatctttctttttctgctctatgaaatctcttatacgcgtcctgtgtttagtttccttctgctatattttctaatcccttttttgtatctatatcacttctttctcgcttttatattgccgtcttccttctctgttttactggattcatcgttatttcggtctcttgtccttcttttgttcaatctattcttgctcattttgctttatccctcctgttgctgcgtcttctttcctctttcgtgttttgtcttccttcttcttttttcgtgctgtgaatctctctatttgtcttttgtgcttgtattttctcctaccatgtttcttatctttccgttctcctctccgtctttcttttttcgctcccttctgattgtttatttctcttttntctttgtttgtatgtttcgtccccgctttgttttttgtccgctctgtgtctcttcctttgttttttctctggctctctcccatctcttctctgttctttttaagttgcctttttgccgtcgttctagtctttgtcttatctcgtatcctattcgtctctctcggtgttagtcttgttgtctcctcttttgtgctcctcctctcatttggtgtttctcctatgtttgtatgttgttcctcttattgtgtttctcttctctgtatttctgtgatcctctccgcccgcttcttctcgagtcgtttgatttgatgttttgtgttttgtggtgcccttgtgtttgtttcgttgtctctgtttcgtcgttttttgc

SEQ ID NO: 1900 - protein, 232 aa, Homo sapiens
  MOD_RES (177)..(177): Variable amino acid
MLFNAEFHCILVTFLLWLCSFFLLYSFIVFYRFSSLMCGLILRLTCNIFLFLLYEISYTRPVFSFLLLYFLIPFLYLYHFFLAFILPSSFSVLLDSSLFRSLVLLLFNLFLLILLYPSCCCVFFPLSCFVFLLLFSCCESLYLSFVLVFSPTMFLIFPFSSPSFFFRSLLIVYFSFXFVCMFRPRFVFCPLCVSSFVFSLALSHLFSVLFKLPFCRRSSLCLISYPIRLSRC

SEQ ID NO: 1901 - DNA, 1618 bp, Homo sapiens
  source
  (1)..(1618)
  CDS (201)..(1418)
  modified_base (209)..(218): a, t, c, g, unknown or other
  modified_base (1350)..(1359): a, t, c, g, unknown or other
acaacaaaacaaaaaaaaggccccccccaagggtgtgggggtcccgggggtttgcccccccccccccccaaggggaaaaaaattctttttttaggagggcccccttttctttagggggggaaaattttttttttctttttccaacaagacgggggaggggggccccccttccccccccccccccccggcaaggattacgaatgggaggnnnnnnnnnnccttctcttcttcctcttatcctctctctcttctcttctctctctcgtttctctctctgcctcttctcttcctctctcctcctcttctccccctcctctctaccttccctcctcgtccttctcctttctctccctcctctccctcttctctccttctctctcttctctctctctttctctcctcgtttcttctctcttcgttctcttccttcttctcttccctcccctctctcttcgtccctctcctgccccctcctgttttttcctctcccctctcttctctcccctctccccctcccccttcctttttctctctttcttctcttcccccctcctctccctctccctctcctctcgcctcctcctctctttctctcctctctttctcccccccctctctctctccctcctcattcaccacttccctcccccctccctctcctctttgctctctctctctctccctccccctccctccctccccctcgctctcacctcctcctcctccttcgctctctctcctcaccccccaccagccccgctctgcctcgccctccgctcctcctctcttttctattttttttctctcccctgcgcctctttctctccggcttcctctctcttttttttttttttttgtttctgctgtacaccctccttctcacccgcacccggcttctctcttttttcccccccccaatcctctcttccttcctctttctttttctttttaatcctctctctctctcttctttttcctcccccctccctccccccttctctttttttttctcttctccccccctccccccacccatcaaccccccccccccccaccttctttttctctcttttttttctctttcttctttttctgcgccccgcgctctctctcctctttcttctattcctccccccaccccccacacttgtttcgccgcgcccccccctccccctcccccccccccccttttggtttcccccctctttcccccccccctccccccccttttatttttttttttttttcccctctccccccctcctcttttttttttattctccccccgcccccgcttgttttttttcttttttcccccccccagggattcccgaagggttggggaaagcnnnnnnnnnnaaaaaataggaaaaaaaatatttttttgtggagaggggcgttgggttcctctttgttagaaagacaaaaaaaaacccgcccgctcttctccttttaatattacaaaaaaaaaaaaaattttggtggggggggacacaaaaaaaaagaaaaaacctcggcgcgcctcttaaagattttttttttagggggggggggggctttttttttttttttttcccccgggagggggggggtttaaaaaaaaggagaatgttttcac

SEQ ID NO: 1902 - protein, 405 aa, Homo sapiens
  MOD_RES (4)..(6): Variable amino acid
  MOD_RES (384)..(387): Variable amino acid
MGGXXXPSLLPLILSLFSSLSRFSLCLFSSSLLLFSPSSLPSLLVLLLSLPPLPLLSFSLFSLSFSPRFFSLRSLPSSLPSPLSSSLSCPLLFFPLPSLLSPLPLPLPFSLFLLFPPPLPLPLLSPPPLFLSSLSPPPLSLPPHSPLPSPLPLLFALSLSPSPSLPPPRSHLLLLLRSLSSPPTSPALPRPPLLLSFLFFFSPLRLFLSGFLSLFFFFLFLLYTLLLTRTRLLSFFPPPILSSFLFLFLFNPLSLSSFSSPLPPPFSFFFSSPPLPPPINPPPPHLLFLSFFSLSSFSAPRALSPLSSIPPPTPHTCFAAPPPPPPPPPLLVSPLFPPPLPPLLFFFFFPLSPPPLFFLFSPRPRLFFFFFPPPRDSRRVGESXXXXKIGKKIFFCGEGRWVPLC

SEQ ID NO: 1903 - DNA, 1384 bp, Homo sapiens
  source
  (1)..(1384)
  CDS (201)..(1184)
  modified_base (554)..(563): a, t, c, g, unknown or other
ttttcctcttcttctctcctctcttcttttcttttttttttctctttctccctctttctctcttctttttttttccctcccttctcctccttcccctctcttctccctcctttcctcttccctcttcttccccccctttccctccctccctcttttttttttcttcctttctttctcctcctcctccttttttcctctgcatgtgttctcttcttctccctctttcccctcccctccccccctctttcctttccttctcccccctctcttcccccttcttttctcctctttttctcttttttccctccccttcctctcctcccccttctttcttcccccccttcccctctttcctttccttttctcggcgttgtttttttttttttttccttttctcccctcctttctctttttcctccccttccctccccccccccccttccccccccccccccccaccccccccccccccccccccccctctccttttttttttttttttttttttgccccccggttccccggcatggttcccggggtttttggttagtttnnnnnnnnnnattcttttctctttttcctctcctttttcttctctcttccatccctccatcttctcccttctccttctcttttctttttcttaccttctctctccctctcccccccacctcccccctccccccccccccccccctccttctctctttttttttttttcttttccctttcccctcccctcctttcttttcttttttctctcttctcccctctctctcttccctccttttttctttctttttctctttttttttttttttttttttctcccccgccgtccttcttcttctttcttttctcctccccccccccccccccccccctccccccccccctttttttttttttgtccttccctttctccgtttctttcttttttttctcttccctctctttccttactccttcccccccccccccccttttttttttctttttttttcttttttccaccccaaccccttcccccccccctttttttttttttttccccctctgccccacacccaccttttttttttcccccccccccccccctattttttttctatctcttctcccccccccccccccccccgccccgccgttttttttcaattttttttttttttttttttttttaacccccttttttttctctcttctttttttttgccccccacaccacacaaaaaaaaaaattttttttcttttttttttttttttaaattttttttctcccccccccccccctttttctcccccccttttttcttccccaaataaaattttttttttttttcccccccgcgcacccagaattttttttttcccccgggcaggg

SEQ ID NO: 1904 - protein, 327 aa, Homo sapiens
  MOD_RES (118)..(121): Variable amino acid
MCSLLLPLSPPLPPSFLSFSPLSSPFFSPLFLFFPSPSSPPPSFFPPFPSFLSFSRRCFFFFFLFSPPFSFSSPSLPPPPSPPPPPPPPPPPPPLLFFFFFFLPPGSPAWFPGFLVSXXXXILFSFSSPFSSLFHPSIFSLLLLFSFSYLLSPSPPHLPPPPPPPPPSLFFFFSFPFPLPSFLFFFLSSPLSLFPPFFFLFLFFFFFFFLPRRPSSSFFSPPPPPPPPSPPPFFFFCPSLSPFLSFFSLPSLSLLLPPPPPFFFSFFFFFPPQPLPPPLFFFFSPSAPHPPFFFPPPPPLFFFYLFSPPPPPPPRRFFSIFFFFFFF

SEQ ID NO: 1905 - DNA, 1315 bp, Homo sapiens
  source
  (1)..(1315)
  CDS (201)..(1115)
  modified_base (274)..(274): a, t, c, g, unknown or other
  modified_base (1203)..(1203): a, t, c, g, unknown or other
  modified_base (1209)..(1209): a, t, c, g, unknown or other
tttcctttaacctaacaggggaagaaattaatttttagattttttatatcattatgcagcttttggggaaaaataattgctgttttggagtcataggatttaccaaaaatctatcagataaatctatcaaatattccatcaaacgaagatttttttttttttgagatcttgctgtgttgcccaggctagagtgcagcagcatggtgatggctcacaacagcagttatgtctctcgcgcgactctcgtctccctccgtttctctctcgtcattcntatttccgtctcctgcccctcatctctctctcgtctcttgtatgttcgtgtccctctcatcctctcgtgtcctctctctcacatgcacgttctgtctcgcgcgtgtgcgtactctctctcattctcccgtctcgcgtctcctctctcattctcgctgttcgtgttcttctttctctctcgtcttcgtgctctctccttcgcgcttctcgcgtctgtactctctctctttttccgtcatgcgtcctctcaccctgtccttctgctctttctgtgctcctcccttcgcgctcctctccgttcacgccctccctgccccacttctcgtctgctactcgcgttcttcctcctctctctccgtttcgttctgtgttcccttcctcccttcgtcctctcgcgcctcttcgcttctcgtctcctcctctcttctctctgccttctcccttcgccgtcgttttattcgcttctcttctcttctccttctttcgcctttttttcttctctcttccccccgctttctcggtcttgtcccgtctccttctttccttcgggctcctctctcctctttttccccttccttctccccgttctcctccgtcctcttctccttactccctcttttctttctcctcctcgttcccctcctcctgtctttcttctttttccctttttttttaattctttctttccccctcttgtgcttttctttcctcccgtctttttcgttgtgtttccccttccttccgccctccttcctcccttggcttgctgttcttctttccctgtccccttctttttcttgttttttctcttggggggggggcgcgcctctctttctctttaaatagcggcccctttttgttgcgcgcgccggggggactattaacgtggtggtgttagcccgcccatctataattcttttccggccggtnggtttnctcgacgataaaccccgaggccattcttggtctacggaaagtgaatattgctgccggtgacaaagcgccggcacgtagcaagctggcgaacttgcccgctacgaat

SEQ ID NO: 1906 - protein, 304 aa, Homo sapiens
  MOD_RES (25)..(25): Variable amino acid
MVMAHNSSYVSRATLVSLRFSLVIXISVSCPSSLSRLLYVRVPLILSCPLSHMHVLSRACAYSLSFSRLASPLSFSLFVFFFLSRLRALSFALLASVLSLFFRHASSHPVLLLFLCSSLRAPLRSRPPCPTSRLLLAFFLLSLRFVLCSLPPFVLSRLFASRLLLSSLCLLPSPSFYSLLFSSPSFAFFSSLFPPLSRSCPVSFFPSGSSLLFFPFLLPVLLRPLLLTPSFLSPPRSPPPVFLLFPFFFNSFFPPLVLFFPPVFFVVFPLPSALLPPLACCSSFPVPFFFLFFLLGGGRASLSL

SEQ ID NO: 1907 - DNA, 1564 bp, Homo sapiens
  source
  (1)..(1564)
  CDS (201)..(1364)
  modified_base (214)..(214): a, t, c, g, unknown or other
  modified_base (223)..(223): a, t, c, g, unknown or other
  modified_base (251)..(251): a, t, c, g, unknown or other
  modified_base (1369)..(1369): a, t, c, g, unknown or other
  modified_base (1389)..(1400): a, t, c, g, unknown or other
  modified_base (1441)..(1441): a, t, c, g, unknown or other
  modified_base (1456)..(1457): a, t, c, g, unknown or other
  modified_base (1471)..(1472): a, t, c, g, unknown or other
  modified_base (1476)..(1476): a, t, c, g, unknown or other
  modified_base (1482)..(1484): a, t, c, g, unknown or other
  modified_base (1487)..(1488): a, t, c, g, unknown or other
  modified_base (1493)..(1493): a, t, c, g, unknown or other
  modified_base (1497)..(1497): a, t, c, g, unknown or other
atagaagacatttccagtaactgtgatttcagtgatttcaaagctaaatgaataggagtttcatgcaccatctcataagcattgcatttgcccagaaaactgcttaaacttgacttcagacattgtactacactctgcttctgtaatggatcagttcgctggtatatatgaaattgtaacaggctgtgcataaggctttcatgcctacacattntcacgcggnctccagcggccgccgtaggacgcgcttngttgccccgccgtctcctcgcagtcttcgccgggtgtgtgcgcgattctccgtcgtattctggcggtcgccgtcgcgagttcgctcggctgtggcggcgggtggggcgggtgttcggctgctccggcggtcggggtgtttgtgcggtctgtgtggtagcccggctgttccgtcaatctgtatgttgcgcgcctgtcggcggttctcgtttgtctgcgcgttctccggttgtgtttgggtgggcggcttgtggctttgcccggtgctgcgagtagccggtgttggccgttccgggttcgcgcgtctacgtgttgtggtgatgtcgttttgcggttgtggtatttgcgtttcggtcggtcgcggcgttccgcctggcgtgtgtgcggttcggcgtgggtcgttgcgggttgggcgtgtcgggtcgttggtttcgttgtccggtttttggttctctgcgccgttcttgtttcggttgtcgtgtcgtcttttgcttgccgtgttcgttttcggttcttgttcggtgtgtggtctcgttgtcgcggcggttgtgcggtgcggtgtcgtggtgggttgcggggcgctgctcggtcgggtcggtgtggtttcgcttgatgtcggcgctgggtcctttcgggttcggtttgctttggtttccgttgcgttttctttcgcgtgcgcggtctgtcgggtgccggttggtttgtgttctttggctccctttggttcccattgtttgcgtggcattcctgtgcgtccggttcggtcggttggtcggctgttgcccgttcgggtccgttcggtctgttcagcggttcgttgtttcccggggtgtggtcccgtgtgtggttgtgttccgttgcttccttggtgtggttcatccttttcgtcggggcgtcgctgggttcgtgccggtcgctcggtggtgcgttgggtggttggtgcggtttcgcgttgggttgtcggcccgtgggttgggtggtgcgtggttgcggtgggtgtatgggttgggtggttcggtggtgcgtgtcggtccttggggtggttggaaccggcccaccggtccgatgggtgcggggcgttggcgcgggtttgctggggtggccgcgggaggtgaagggntcacaatgcttcatctggcnnnnnnnnnnnncccctccgccctttttttttttttaacaaaaaaaaaaggcncagccagggacgggnnattgaaaccctgannccantcggannnccnnagaancttncttctacgcgtgcagggacgcgcctggcagcggcccaccctgaggctgcatgacaggaaccggtccc

SEQ ID NO: 1908 - protein, 387 aa, Homo sapiens
  MOD_RES (5)..(5): Variable amino acid
  MOD_RES (8)..(8): Variable amino acid
  MOD_RES (17)..(17): Variable amino acid
MPTHXHAXSSGRRRTRXVAPPSPRSLRRVCARFSVVFWRSPSRVRSAVAAGGAGVRLLRRSGCLCGLCGSPAVPSICMLRACRRFSFVCAFSGCVWVGGLWLCPVLRVAGVGRSGFARLRVVVMSFCGCGICVSVGRGVPPGVCAVRRGSLRVGRVGSLVSLSGFWFSAPFLFRLSCRLLLAVFVFGSCSVCGLVVAAVVRCGVVVGCGALLGRVGVVSLDVGAGSFRVRFALVSVAFSFACAVCRVPVGLCSLAPFGSHCLRGIPVRPVRSVGRLLPVRVRSVCSAVRCFPGCGPVCGCVPLLPWCGSSFSSGRRWVRAGRSVVRWVVGAVSRWVVGPWVGWCVVAVGVWVGWFGGACRSLGWLEPAHRSDGCGALARVCWGGRGR

SEQ ID NO: 1909 - DNA, 1108 bp, Homo sapiens
  source
  (1)..(1108)
  CDS (201)..(908)
  modified_base (1)..(60): a, t, c, g, unknown or other
  modified_base (69)..(69): a, t, c, g, unknown or other
  modified_base (77)..(77): a, t, c, g, unknown or other
  modified_base (95)..(95): a, t, c, g, unknown or other
  modified_base (100)..(101): a, t, c, g, unknown or other
  modified_base (323)..(323): a, t, c, g, unknown or other
  modified_base (927)..(1026): a, t, c, g, unknown or other
  modified_base (1039)..(1039): a, t, c, g, unknown or other
  modified_base (1042)..(1042): a, t, c, g, unknown or other
  modified_base (1066)..(1066): a, t, c, g, unknown or other
nnnnnnnnnnnnnnnnnnnnnnnnnnnnnnnnnnnnnnnnnnnnnnnnnnnnnnnnnnnnaccatagcntgctaggntgccggtgcgactctagnggatnnccttagcaatgggatcatcttcagtgattctaaggcaggtagcccatgttccacactttgagagccttaagttagattcagggaaagctggtcagggggatgttttccatgatggctcccccatcccctaacccctccctcaacagtgactctgtctgtttgtcgcttatgttttgttttctgagccctgctcctgggtttgggcggggggggtgctcctgncctcttgtgctcctccctcctctccctgtgggggggctgggctttcgtgcgcggtcccctcccggcggcctcttggttgtgcctggcgccccgctcttccttcggcctttgccgggtcccgtctgttgtcttttgtttgttcttgtgttttcccccgccggggttgcccctttcgcccgcccctcctcttggttgtccgttttttgcgctttctcccttgttctcccttccgtctccttccgtgtgttttttgtgtggggctctggcgccccgccgtgctgtttcgcgtccgtcgccccgtcccccggcttttctcctcgtttcctcttgtcctttctcgccgcgtctcgtttctccgtctttttcttggtcgggctggcctggctcggtgggggtggtcggtctcgtgctctctggtgggttccttttctcttctttcttgtccgcgtgggggctgcgggtctcgggtgctgtcgttctccgcggtctgtgtgtttgtctgttctttttttctgctgtctgtcgtccggtgctctccccgttctgtccttttccgcttgtctcgttggctttcggaaactgtagaaataaaaaaaaaaaaaannnnnnnnnnnnnnnnnnnnnnnnnnnnnnnnnnnnnnnnnnnnnnnnnnnnnnnnnnnnnnnnnnnnnnnnnnnnnnnnnnnnnnnnnnnnnnnnnnnngaactttagcttngcntaaacctgcggtggcggctctagnagaaaccctctgcccggtcaggtgatgcacttcaaaaagcct

SEQ ID NO: 1910 - protein, 235 aa, Homo sapiens
  MOD_RES (41)..(41): Variable amino acid
MFSMMAPPSPNPSLNSDSVCLSLMFCFLSPAPGFGRGGCSXPLVLLPPLPVGGLGFRARSPPGGLLVVPGAPLFLRPLPGPVCCLLFVLVFSPAGVAPFARPSSWLSVFCAFSLVLPSVSFRVFFVWGSGAPPCCFASVAPSPGFSPRFLLSFLAASRFSVFFLVGLAWLGGGGRSRALWWVPFLFFLVRVGAAGLGCCRSPRSVCLSVLFFCCLSSGALPVLSFSACLVGFRKL

SEQ ID NO: 1911 - DNA, 1213 bp, Homo sapiens
  source
  (1)..(1213)
  CDS (201)..(1013)
  modified_base (8)..(108): a, t, c, g, unknown or other
  modified_base (117)..(117): a, t, c, g, unknown or other
  modified_base (134)..(134): a, t, c, g, unknown or other
  modified_base (143)..(143): a, t, c, g, unknown or other
  modified_base (424)..(424): a, t, c, g, unknown or other
  modified_base (435)..(435): a, t, c, g, unknown or other
  modified_base (456)..(456): a, t, c, g, unknown or other
  modified_base (462)..(462): a, t, c, g, unknown or other
  modified_base (483)..(483): a, t, c, g, unknown or other
  modified_base (584)..(584): a, t, c, g, unknown or other
  modified_base (662)..(662): a, t, c, g, unknown or other
  modified_base (689)..(689): a, t, c, g, unknown or other
  modified_base (698)..(698): a, t, c, g, unknown or other
  modified_base (700)..(700): a, t, c, g, unknown or other
  modified_base (716)..(716): a, t, c, g, unknown or other
  modified_base (738)..(738): a, t, c, g, unknown or other
  modified_base (753)..(753): a, t, c, g, unknown or other
  modified_base (859)..(958): a, t, c, g, unknown or other
  modified_base (972)..(972): a, t, c, g, unknown or other
  modified_base (986)..(986): a, t, c, g, unknown or other
  modified_base (999)..(999): a, t, c, g, unknown or other
atatactnnnnnnnnnnnnnnnnnnnnnnnnnnnnnnnnnnnnnnnnnnnnnnnnnnnnnnnnnnnnnnnnnnnnnnnnnnnnnnnnnnnnnnnnnnnnnnnnnnnnnagtacatcnggtacgacggagcatcnggactatgngagcgctccgtctatgtgtctgtgtgtttgtgtgtgtgtctctgtgtgtgtacttgtatgttggggtatgggtatgggtatgtgttgtgtgtatgtgcatgcgcacttgtgtggtacgtgtctgtctgtgtatgtttgtgtgtgtttgtatgtgggtgtatggatatgggttgtgtgtgtgtgtctctgtgtctgtgtgtgagtttatgtgtgtttgtgaggggtacggatatgggtgtgtgtatgcttgtgtgtgtatgtgaatgtggggggggtgtgtngtgtgtgtgtntgtggagggatatgggtgtgnttgttngtgtgtgtggttttttttttngtgggtgtgggtgttgggttgtgtttgttgttgggttgttttctggtttttttttgttgtggggttttgtttttttttttttgttttttgttgggttgggnttggtttttttttttttttttttttggtttgttgggtggggggttggtttttgtgtttttgtgtttggttggttgggngttttggtttttttttgttttgattgntgttttgtngntttttttttttttttntgggtatttgggtgtgggtttngtggtgtgggtggtnttgttgaggtgtggtgtgtttggtgtgggtttgttgtttttgttggtgttggtggggggttgtgggggtttggattttatataaacaaccacccaccccaccaccnnnnnnnnnnnnnnnnnnnnnnnnnnnnnnnnnnnnnnnnnnnnnnnnnnnnnnnnnnnnnnnnnnnnnnnnnnnnnnnnnnnnnnnnnnnnnnnnnnnnggttcctagtttgntagcccctcactcngggtctaaggatnccgatcatatataagtggctatatctgtggttaaaattgttttgccaacagtagcattttcttgttttctccacaaatccaaattctactcattctttcttttgcttcagtcttctttttctcataaagccttccctcctttcaatgcttctgcctactgtgctatattttccttcatgcaatagatccttttctttgagaaagggtctaggta

SEQ ID NO: 1912 - protein, 270 aa, Homo sapiens
  MOD_RES (75)..(75): Variable amino acid
  MOD_RES (79)..(79): Variable amino acid
  MOD_RES (86)..(86): Variable amino acid
  MOD_RES (88)..(88): Variable amino acid
  MOD_RES (95)..(95): Variable amino acid
  MOD_RES (163)..(163): Variable amino acid
  MOD_RES (167)..(167): Variable amino acid
  MOD_RES (172)..(172): Variable amino acid
  MOD_RES (180)..(180): Variable amino acid
  MOD_RES (185)..(185): Variable amino acid
  MOD_RES (220)..(253): Variable amino acid
  MOD_RES (258)..(258): Variable amino acid
  MOD_RES (267)..(267): Variable amino acid
MLGYGYGYVLCVCACALVWYVSVCVCLCVFVCGCMDMGCVCVSLCLCVSLCVFVRGTDMGVCMLVCVCECGGGVXCVCXWRDMGVXVXVCGFFFXGCGCWVVFVVGLFSGFFLLWGFVFFFLFFVGLGLVFFFFFFWFVGWGVGFCVFVFGWLGVLVFFCFDXCFVXFFFFXWVFGCGFXGVGGXVEVWCVWCGFVVFVGVGGGLWGFGFYINNHPPHHXXXXXXXXXXXXXXXXXXXXXXXXXXXXXXXXXXVPSLXAPHSGSKDXDHI

SEQ ID NO: 1913 - DNA, 1231 bp, Homo sapiens
  source
  (1)..(1231)
  CDS (201)..(1031)
  modified_base (1)..(9): a, t, c, g, unknown or other
  modified_base (23)..(24): a, t, c, g, unknown or other
  modified_base (32)..(32): a, t, c, g, unknown or other
  modified_base (37)..(38): a, t, c, g, unknown or other
  modified_base (40)..(40): a, t, c, g, unknown or other
  modified_base (48)..(48): a, t, c, g, unknown or other
  modified_base (272)..(272): a, t, c, g, unknown or other
  modified_base (276)..(279): a, t, c, g, unknown or other
  modified_base (281)..(281): a, t, c, g, unknown or other
  modified_base (283)..(283): a, t, c, g, unknown or other
  modified_base (285)..(285): a, t, c, g, unknown or other
  modified_base (289)..(289): a, t, c, g, unknown or other
  modified_base (291)..(291): a, t, c, g, unknown or other
  modified_base (293)..(293): a, t, c, g, unknown or other
  modified_base (297)..(299): a, t, c, g, unknown or other
  modified_base (317)..(318): a, t, c, g, unknown or other
  modified_base (326)..(328): a, t, c, g, unknown or other
  modified_base (333)..(334): a, t, c, g, unknown or other
  modified_base (338)..(338): a, t, c, g, unknown or other
  modified_base (340)..(341): a, t, c, g, unknown or other
  modified_base (346)..(347): a, t, c, g, unknown or other
  modified_base (349)..(349): a, t, c, g, unknown or other
  modified_base (353)..(353): a, t, c, g, unknown or other
  modified_base (397)..(397): a, t, c, g, unknown or other
  modified_base (533)..(533): a, t, c, g, unknown or other
  modified_base (735)..(735): a, t, c, g, unknown or other
  modified_base (888)..(888): a, t, c, g, unknown or other
  modified_base (912)..(1011): a, t, c, g, unknown or other
  modified_base (1038)..(1038): a, t, c, g, unknown or other
  modified_base (1044)..(1044): a, t, c, g, unknown or other
  modified_base (1053)..(1053): a, t, c, g, unknown or other
nnnnnnnnncctcgacaaggtanngaattttnttcanntncgactatngtgagtgctgccacacacgtacacatacacgtcgcacacacatatgtatatatatctttagaattccagtcatttaaaaagtaagaatccatgtattcaaaaacaatttattcaaaaacaatatggtctaacaatttagatcatattgaataatgtgtgtgtgtgtgtgcgtgtgtgtctctgtgtgtgtgtgtgtgtgtgtgtgtgtgggggggggtgcacgngtgnnnncncncnctcncncncccnnnctggggggggggggggcnntccccccnnnctgcnncctntnnctccnngntttncgggggggtcctcgcgcgggggtcggtggtggggggggtttttnttggggggggggtttgggtgcgtgccgcgccggcggggtgctttttttgttttgtggggggtggggggggtggggtggggggggggggggtttttggggggcttgggttgggtgggcgcgtggtggggtggcgtgnttttgtgtgggcggggttgcggtggggggccggggcgtgtgcgtgtgggtggcctttgcgtggggggtgcggctgtgtttttggggttggggtggggggggggtggtgtggggtgggttgtgcggtggtggggtggtttggggcggcgggtgggggggggtggttggcgtgtggcgcgtctcggtgttttcgttgttttttntgtgggcgggtcgttcgttcgtcggtctctgtcgcgcgcggcggcgcgcggttgttggtggggtggtgtgcggggtcgcgtttgcggcgtgttgttggggttgtgcgggggggcgcgttgtggtgtgggcgggggtgtttgtgtggctgttgngcccctccgtgtggagggcggtcnnnnnnnnnnnnnnnnnnnnnnnnnnnnnnnnnnnnnnnnnnnnnnnnnnnnnnnnnnnnnnnnnnnnnnnnnnnnnnnnnnnnnnnnnnnnnnnnnnnncctccatgcttgatgcttgactttgcnactatngaaggtcgncctcatttacatacttacttttagcctagagaaagcaaccaaagatctgtcactagaatagcttagtgccactcactccaggagtaaaggaaaggtctcttttccaagcctgtgtattcaaaccatgatcaggaattgtttgggaattatgtgaaataaatcttgactctagagttca

SEQ ID NO: 1914 - protein, 276 aa, Homo sapiens
  MOD_RES (26)..(31): Variable amino acid
  MOD_RES (33)..(33): Variable amino acid
  MOD_RES (40)..(40): Variable amino acid
  MOD_RES (43)..(43): Variable amino acid
  MOD_RES (45)..(45): Variable amino acid
  MOD_RES (47)..(47): Variable amino acid
  MOD_RES (49)..(51): Variable amino acid
  MOD_RES (66)..(66): Variable amino acid
  MOD_RES (111)..(111): Variable amino acid
  MOD_RES (179)..(179): Variable amino acid
  MOD_RES (230)..(230): Variable amino acid
  MOD_RES (238)..(271): Variable amino acid
MCVCVCVCVSVCVCVCVCVGGGARVXXXXXXPXLGGGGAXPPXCXLXLXXXRGGPRAGVGGGGGFXWGGGLGACRAGGVLFLFCGGWGGWGGGGGGFWGAWVGWARGGVAXFCVGGVAVGGRGVCVWVAFAWGVRLCFWGWGGGGVVWGGLCGGGVVWGGGWGGVVGVWRVSVFSLFFXWAGRSFVGLCRARRRAVVGGVVCGVAFAACCWGCAGGRVVVWAGVFVWLLXPSVWRAVXXXXXXXXXXXXXXXXXXXXXXXXXXXXXXXXXXSMLDA

SEQ ID NO: 1915 - DNA, 1387 bp, Homo sapiens
  source
  (1)..(1387)
  CDS (201)..(1187)
  modified_base (12)..(12): a, t, c, g, unknown or other
  modified_base (23)..(24): a, t, c, g, unknown or other
  modified_base (37)..(37): a, t, c, g, unknown or other
  modified_base (44)..(44): a, t, c, g, unknown or other
  modified_base (319)..(319): a, t, c, g, unknown or other
  modified_base (327)..(328): a, t, c, g, unknown or other
  modified_base (345)..(345): a, t, c, g, unknown or other
  modified_base (352)..(352): a, t, c, g, unknown or other
  modified_base (354)..(354): a, t, c, g, unknown or other
  modified_base (458)..(458): a, t, c, g, unknown or other
  modified_base (541)..(541): a, t, c, g, unknown or other
  modified_base (603)..(603): a, t, c, g, unknown or other
  modified_base (634)..(635): a, t, c, g, unknown or other
  modified_base (648)..(648): a, t, c, g, unknown or other
  modified_base (650)..(650): a, t, c, g, unknown or other
  modified_base (653)..(666): a, t, c, g, unknown or other
  modified_base (668)..(683): a, t, c, g, unknown or other
  modified_base (685)..(685): a, t, c, g, unknown or other
  modified_base (687)..(687): a, t, c, g, unknown or other
  modified_base (689)..(689): a, t, c, g, unknown or other
  modified_base (692)..(693): a, t, c, g, unknown or other
  modified_base (695)..(696): a, t, c, g, unknown or other
  modified_base (709)..(709): a, t, c, g, unknown or other
  modified_base (711)..(711): a, t, c, g, unknown or other
  modified_base (715)..(715): a, t, c, g, unknown or other
  modified_base (734)..(735): a, t, c, g, unknown or other
  modified_base (778)..(780): a, t, c, g, unknown or other
  modified_base (796)..(796): a, t, c, g, unknown or other
  modified_base (805)..(805): a, t, c, g, unknown or other
  modified_base (863)..(962): a, t, c, g, unknown or other
  modified_base (975)..(975): a, t, c, g, unknown or other
  modified_base (993)..(995): a, t, c, g, unknown or other
  modified_base (1000)..(1000): a, t, c, g, unknown or other
  modified_base (1002)..(1002): a, t, c, g, unknown or other
  modified_base (1008)..(1008): a, t, c, g, unknown or other
ttagcttgatgnttcgattttgnnactctgaggtcgnctttganagtgtctgttcatgcctttgcccactttttgagggcttgtttgtttttttcttgtaaatttgtttgagttctttgtagattctggatattagccctttatcagatgagtagattgcaaaaattgtctcccattttgtaggttgcctgttcactctgatggttgtttcttttgctctgcagaagctcctgggggggattagatcccatttgtcaattttggcttttgttgccattgctgggtggtgttttagacctgaagtccttgcccatgcctntgtcctgnntggtcctgcctcggtcntcttgtngngtttctgtgggttttggtttggcggttggggttgggggccctgtggggtggtttttccctttttttttttctctcctcttgggtgggtggggggggtggtttgngttggtctcttgtgggttgtccgcgcgtggcccgggctttttgttggctggtggttgttgtttttgttccgtgttgttgtggngggtggggggtctctcttggtgtttgtgcgctttggtcgtgcttttgttttgtggggcggtnggttgcgtggggctgccctttcgttctgttnnttcccgaaggggngnggnnnnnnnnnnnnnngnnnnnnnnnnnnnnnngngngnggnngnnggggggggggggngngggnggggggggggggggggggnnggggggggggggggggggggggggggggggggggggggggggnnnggggggggggaggggnggggccccnggggcgggggggggggggggggggacggcgcgaccacacaacaaaaacaaaaaaaaannnnnnnnnnnnnnnnnnnnnnnnnnnnnnnnnnnnnnnnnnnnnnnnnnnnnnnnnnnnnnnnnnnnnnnnnnnnnnnnnnnnnnnnnnnnnnnnnnnngttccaattgttngaaatgtttcgattttgnnncaaangnaggtcnccctcttgataacctttctcttgtatcctgaattgtacccagatgctccccgcccctgcacacctcaacctgcctcttctccagtcattttgaactatttgcagctctcacatgtgactgctctttctggctttcaagcttttacatatacatctttccttggatttggttgtttttagtttatgcttttttctattttgctgatcgatagcctgatcaattgtttaattcctccactctattagcttcatagttgcatctatttacattctgatgatctttacattttaggttatattcatattttacactaacaaaataaaagactaatggaaatgtctattttgccccctaacacaaagagctgagaatgcttgta

SEQ ID NO: 1916 - protein, 328 aa, Homo sapiens
  MOD_RES (40)..(40): Variable amino acid
  MOD_RES (43)..(43): Variable amino acid
  MOD_RES (49)..(49): Variable amino acid
  MOD_RES (51)..(52): Variable amino acid
  MOD_RES (86)..(86): Variable amino acid
  MOD_RES (114)..(114): Variable amino acid
  MOD_RES (135)..(135): Variable amino acid
  MOD_RES (145)..(145): Variable amino acid
  MOD_RES (150)..(150): Variable amino acid
  MOD_RES (152)..(163): Variable amino acid
  MOD_RES (165)..(166): Variable amino acid
  MOD_RES (170)..(172): Variable amino acid
  MOD_RES (179)..(179): Variable amino acid
  MOD_RES (193)..(194): Variable amino acid
  MOD_RES (199)..(199): Variable amino acid
  MOD_RES (202)..(202): Variable amino acid
  MOD_RES (221)..(254): Variable amino acid
  MOD_RES (259)..(259): Variable amino acid
  MOD_RES (265)..(265): Variable amino acid
  MOD_RES (267)..(268): Variable amino acid
  MOD_RES (270)..(270): Variable amino acid
MVVSFALQKLLGGIRSHLSILAFVAIAGWCFRPEVLAHAXVLXGPASVXLXXFCGFWFGGWGWGPCGVVFPFFFFSPLGWVGGVVXVGLLWVVRAWPGLFVGWWLLFLFRVVVXGGGSLLVFVRFGRAFVLWGGXLRGAALSFCXFPKGXGXXXXXXXXXXXXGXXGGGXXXGGGGGGXGGGGGGGGGGGGGXXGGGGXGPXGRGGGGGGRRDHTTKTKKXXXXXXXXXXXXXXXXXXXXXXXXXXXXXXXXXXVPIVXNVSILXQXXVXLLITFLLYPELYPDAPRPCTPQPASSPVILNYLQLSHVTALSGFQAFTYTSFLGFGCF

SEQ ID NO: 1917 - DNA, 1399 bp, Homo sapiens
  source
  (1)..(1399)
  CDS (201)..(1199)
  modified_base (1)..(94): a, t, c, g, unknown or other
  modified_base (117)..(118): a, t, c, g, unknown or other
  modified_base (127)..(127): a, t, c, g, unknown or other
  modified_base (193)..(193): a, t, c, g, unknown or other
  modified_base (305)..(312): a, t, c, g, unknown or other
  modified_base (324)..(329): a, t, c, g, unknown or other
  modified_base (347)..(347): a, t, c, g, unknown or other
  modified_base (357)..(357): a, t, c, g, unknown or other
  modified_base (365)..(365): a, t, c, g, unknown or other
  modified_base (367)..(367): a, t, c, g, unknown or other
  modified_base (372)..(372): a, t, c, g, unknown or other
  modified_base (379)..(379): a, t, c, g, unknown or other
  modified_base (381)..(382): a, t, c, g, unknown or other
  modified_base (410)..(410): a, t, c, g, unknown or other
  modified_base (571)..(571): a, t, c, g, unknown or other
  modified_base (1068)..(1168): a, t, c, g, unknown or other
  modified_base (1182)..(1182): a, t, c, g, unknown or other
  modified_base (1203)..(1203): a, t, c, g, unknown or other
  modified_base (1205)..(1205): a, t, c, g, unknown or other
nnnnnnnnnnnnnnnnnnnnnnnnnnnnnnnnnnnnnnnnnnnnnnnnnnnnnnnnnnnnnnnnnnnnnnnnnnnnnnnnnnnnnnnnnnnnnngcaactacggtgctagatcctgnnctcgctagnaggacacgctcacatcagcatgctgaatgaaattgatctattttccatttatgagaagtaatattnatacataatgatttgttatgaatggataagtactgtatttcccctgggcacattgtcagccaagcattatatactcaatgctgaggttctgctgggtgtggttaggagtctnnnnnnnntttttttttttnnnnnnttgggggggggggggttntttttttttntttttgtntnttgtnttttttntnntttttttttttttccctttcttgtttgntctttcgcgcctggccggctgtgtgctttttcgtgcggggttccggcctgccctcggtccctggggtgcgtcggctttgcggcgtgcggggtttgccttttttttcgcggcgcgctctttccctccgtttggggggcgggccctgtgggcggctctggggntcccgtgctttggggggcttgtcttgtgtttcgggggttctccccggtgtcccttctgtgttctgtggcttcgtctgtttgggggggtttctccggggtgcttcgttgtccttgggggggcgcggcggttggccccgtgttttgcctgtcccgcctttccgggctggccggcgccgctggccgtggtggcgccgggcgtgtcgggcgtgggcgccggtggggggccgcccggcctgcgtttttttgggtttgcgtgggcgttgccgtgcgttttcgctttttttgcgcgcttgggggtttgcctcttttggcttttgtctgggcgttcttttgccgccttgtgcgccttcttttttctccgcggccgcttggcgcccgcgctcttttgtttctgcgccggccggcttttcttgcggtagccgcggcggttctgcgggcgggtccgggcgcgtttgccggcgcgcgctttgccggcgtttgggaacggtgtcgggccnnnnnnnnnnnnnnnnnnnnnnnnnnnnnnnnnnnnnnnnnnnnnnnnnnnnnnnnnnnnnnnnnnnnnnnnnnnnnnnnnnnnnnnnnnnnnnnnnnnnngcaactaggttgcntagccctgctccactagggtngnaggatcaaactttttcacaaaaaaaaaaaaaaaacaccagagtctcgctttgtcgcccagggtggagtgcgtggcacaatcttggctcactgcaagctccgccttctgggttcacaccattctcctaccttaaccttcggagtagctgggactacaggcgcccgccaccacgcccagttaattttttctatttt

SEQ ID NO: 1918 - protein, 332 aa, Homo sapiens
  MOD_RES (36)..(38): Variable amino acid
  MOD_RES (42)..(43): Variable amino acid
  MOD_RES (49)..(49): Variable amino acid
  MOD_RES (53)..(53): Variable amino acid
  MOD_RES (56)..(56): Variable amino acid
  MOD_RES (58)..(58): Variable amino acid
  MOD_RES (60)..(61): Variable amino acid
  MOD_RES (70)..(70): Variable amino acid
  MOD_RES (124)..(124): Variable amino acid
  MOD_RES (290)..(323): Variable amino acid
  MOD_RES (328)..(328)
MICYEWISTVFPLGTLSAKHYILNAEVLLGVVRSLXXXFFFXXLGGGGXFFFXFVXCXFXXFFFFPFLVXSFAPGRLCAFSCGVPACPRSLGCVGFAACGVCLFFRGALFPSVWGAGPVGGSGXPVLWGACLVFRGFSPVSLLCSVASSVWGGFSGVLRCPWGGAAVGPVFCLSRLSGLAGAAGRGGAGRVGRGRRWGAARPAFFWVCVGVAVRFRFFCALGGLPLLAFVWAFFCRLVRLLFSPRPLGARALLFLRRPAFLAVAAAVLRAGPGAFAGARFAGVWERCRAXXXXXXXXXXXXXXXXXXXXXXXXXXXXXXXXXXQLGCXALLH

SEQ ID NO: 1919 - DNA, 1120 bp, Homo sapiens
  source
  (1)..(1120)
  CDS (201)..(920)
  modified_base (5)..(5): a, t, c, g, unknown or other
  modified_base (30)..(129): a, t, c, g, unknown or other
  modified_base (135)..(135): a, t, c, g, unknown or other
  modified_base (906)..(906): a, t, c, g, unknown or other
  modified_base (909)..(909): a, t, c, g, unknown or other
  modified_base (947)..(1046): a, t, c, g, unknown or other
  modified_base (1055)..(1055): a, t, c, g, unknown or other
  modified_base (1082)..(1082): a, t, c, g, unknown or other
  modified_base (1089)..(1089): a, t, c, g, unknown or other
  modified_base (1106)..(1106): a, t, c, g, unknown or other
aagtnactgcgattcatgcaaaagtgtgcnnnnnnnnnnnnnnnnnnnnnnnnnnnnnnnnnnnnnnnnnnnnnnnnnnnnnnnnnnnnnnnnnnnnnnnnnnnnnnnnnnnnnnnnnnnnnnnnnnnngccttntcctctcctgcagaagacattgcgacagtgaacacgcacacattgcgtcatgtgaacacgcacacatgtgcgtacatgtgtatacacgcacacatgtgcgtacatgtgtatacacgcacacatgtgcgtacatgtgtatacacgcacacatgtgcgtacatgtgtatacacgcacacatgtgcgtacatgtgtatacacgcacacatgtgcgtacatgtgtatacacgcacacatgtgcgtacatgtgtatacacgcacacatgtgcgtacatgtgtatacacgcacacatgtgcgtacatgtgtatacacgcacacatgtgcgtacatgtgtatacacgcacacatgtgcgtacatgtgtatacacgcacacatgtgcgtacatgtgtatacacgcacacatgtgcgtacatgtgtatacatgtgtatatgtatacaagtgtatatacaagtgtatatgtatacaagtgtgtatgtatacgtgtgtgtatgtatacgtgtgtgtatgtatacgtgtgtctacatgcatacgtgtgtgtatacgtgtgtctacatgtatacacgtgtgtgtatacgtgtgtctgtatgtatacatatatatagagtatactctgttgcccagagtatatatacatatatgtatacatatatatacgtatgtatacatatacacgtatgtatacgtatatatggatccatatatacacgtatgtatacgtatatacgtatgtatacatatatacacgcatgtgtacatatatagggtttttnctnctacaaagtgactgcgagttcatgcaaaaagttgtgcnnnnnnnnnnnnnnnnnnnnnnnnnnnnnnnnnnnnnnnnnnnnnnnnnnnnnnnnnnnnnnnnnnnnnnnnnnnnnnnnnnnnnnnnnnnnnnnnnnnngcctcaccnaatacttattcaccaaatgaattacanagcctcntcattcataacattagnagatcccagtgtca

SEQ ID NO: 1920 - protein, 239 aa, Homo sapiens
  MOD_RES (236)..(237): Variable amino acid
MCVHVYTRTHVRTCVYTHTCAYMCIHAHMCVHVYTRTHVRTCVYTHTCAYMCIHAHMCVHVYTRTHVRTCVYTHTCAYMCIHAHMCVHVYTRTHVRTCVYTHTCAYMCIHAHMCVHVYTCVYVYKCIYKCICIQVCMYTCVYVYVCVCIRVSTCIRVCIRVSTCIHVCVYVCLYVYIYIEYTLLPRVYIHICIHIYTYVYIYTYVYVYMDPYIHVCIRIYVCIHIYTHVYIYRVFXXTK

SEQ ID NO: 1921 - DNA, 1231 bp, Homo sapiens
  source
  (1)..(1231)
  CDS (201)..(1031)
  modified_base (1)..(94): a, t, c, g, unknown or other
  modified_base (129)..(129): a, t, c, g, unknown or other
  modified_base (914)..(1013): a, t, c, g, unknown or other
  modified_base (1052)..(1052): a, t, c, g, unknown or other
  modified_base (1055)..(1055): a, t, c, g, unknown or other
nnnnnnnnnnnnnnnnnnnnnnnnnnnnnnnnnnnnnnnnnnnnnnnnnnnnnnnnnnnnnnnnnnnnnnnnnnnnnnnnnnnnnnnnnnnnnngcacatcttttgctgaaccgcagcttccctcgtanaggacaactccgtacatgtgtatacacgcacacatgtgcgtacatgtgtatacacgcacacatgtgcgtacatgtgtatacacgcacacatgtgcgtacatgtgtatacacgcacacatgtgcgtacatgtgtatacacgcacacatgtgcgtacatgtgtatacacgcacacatgtgcgtacatgtgtatacacgcacacatgtgcgtacatgtgtatacacgcacacatgtgcgtacatgtgtatacacgcacacatgtgcgtacatgtgtatacacgcacacatgtgcgtacatgtgtatacacgcacacatgtgcgtacatgtgtatacacgcacacatgtgcgtacatgtgtatacatgtgtatatgtatacaagtgtatatacaagtgtatatgtatacaagtgtgtatgtatacgtgtgtgtatgtatacgtgtgtgtatgtatacgtgtgtctacatgcatacgtgtgtgtatacgtgtgtctacatgtatacacgtgtgtgtatacgtgtgtctgtatgtatacatatatatagagtatactctgttgcccagagtatatatacatatatgtatacatatatatacgtatgtatacatatacacgtatgtatacgtatatatggatccaatatacacgtatgtatacgtatatacgtatgtatacatatatacacgcatgtgtcatatatacgtatgtatacatatatacatgcatgtatacgtatatacgtatgatacatatatacacgtatgtaacgtatatagggtgatatcnnnnnnnnnnnnnnnnnnnnnnnnnnnnnnnnnnnnnnnnnnnnnnnnnnnnnnnnnnnnnnnnnnnnnnnnnnnnnnnnnnnnnnnnnnnnnnnnnnnngcacatacttttgcatgaaacccacgcctactttctagnagnatccccaccactcttaacgagcatgctgccttcaagcatctgtttaacaaagcacatcttgcaccacccttaatccatttaaccctgagtggacacagcacatgtttcagagagcacagggttgggggtagggtcaccgatcaacaggatcacaaggcagaagaatttttcttagt

SEQ ID NO: 1922 - protein, 276 aa, Homo sapiens
  MOD_RES (239)..(271): Variable amino acid
MCIHAHMCVHVYTRTHVRTCVYTHTCAYMCIHAHMCVHVYTRTHVRTCVYTHTCAYMCIHAHMCVHVYTRTHVRTCVYTHTCAYMCIHAHMCVHVYTCVYVYKCIYKCICIQVCMYTCVYVYVCVCIRVSTCIRVCIRVSTCIHVCVYVCLYVYIYIEYTLLPRVYIHICIHIYTYVYIYTYVYVYMDPIYTYVYVYTYVYIYTRMCHIYVCIHIYMHVYVYTYDTYIHVCNVYRVISXXXXXXXXXXXXXXXXXXXXXXXXXXXXXXXXXAHTFA

SEQ ID NO: 1923 - DNA, 1372 bp, Homo sapiens
  source
  (1)..(1372)
  CDS (201)..(1172)
  modified_base (239)..(239): a, t, c, g, unknown or other
  modified_base (274)..(373): a, t, c, g, unknown or other
  modified_base (494)..(494): a, t, c, g, unknown or other
  modified_base (549)..(549): a, t, c, g, unknown or other
  modified_base (576)..(576): a, t, c, g, unknown or other
  modified_base (1157)..(1157): a, t, c, g, unknown or other
  modified_base (1160)..(1161): a, t, c, g, unknown or other
  modified_base (1204)..(1303): a, t, c, g, unknown or other
  modified_base (1315)..(1315): a, t, c, g, unknown or other
  modified_base (1320)..(1320): a, t, c, g, unknown or other
  modified_base (1346)..(1346): a, t, c, g, unknown or other
aaaaaatatttaaggctaaacaatattctgttacaattttttcctcaatgttaggcaaattaaatatcttcatccccactaaccacataggttaaaatcggaatgcatttcaaactatttaaatttctcctactcttaccctaccactcatgaaccctactattttgagttctgaggcaagttcagactgattcaaattcatgtgtcccatggctagtcagagcctggggtgggatctnctacaggtaagctcagtttcagcaaaaagttggcnnnnnnnnnnnnnnnnnnnnnnnnnnnnnnnnnnnnnnnnnnnnnnnnnnnnnnnnnnnnnnnnnnnnnnnnnnnnnnnnnnnnnnnnnnnnnnnnnnnntttaatagctctcaccttgcccagagtatatagtacatgtgcgtacatgttatcacgcacacattgcgtacatgttatacacgcacacatgtgcgtacatgtgtatcacgcacacatgtgntacatgtgtatacacgcacacatgtgcgtacatgtgtatacacgcacacatgtgntacatgtgtatacacgcacacatgtgntacatgtgtatcacgcacacatgtgcgtacatgtgtatacacgcacacatgtgcgtacatgtgtatacacgcacacatgtgcgtacatgtgtatacacgcacacatgtgcgtacatgtgtatacacgcacacatgtgcgtacatgtgtatacatgtgtatatgtatacaagtgtatatacaagtgtatatgtatacaagtgtgtatgtatacgtgtgtgtatgtatacgtgtgtgtatgtatacgtgtgtctacatgcatacgtgtgtgtatacgtgtgtctacatgtatacacgtgtgtgtatacgtgtgtctgtatgtatacatatatatagagtatactctgttgcccagagtatatatacatatatgtatacatatatatacgtatgtatacatatacacgtatgtatacgtatatatggatccatatatacacgtatgtatacgtatatacgtatgtatacatatatacacgcatgtgtacatatatacgtatgtatacatatatacatgcatgtatacgtatatacgtatgtatacatatatacacgtatgtatacgtatatagtgtgtttgatnctnntacaaaagtaggcctggggtttcatgcacacgagtatgtgctnnnnnnnnnnnnnnnnnnnnnnnnnnnnnnnnnnnnnnnnnnnnnnnnnnnnnnnnnnnnnnnnnnnnnnnnnnnnnnnnnnnnnnnnnnnnnnnnnnnnattgcagctttnttctntgacagagggttcaagtcagcatagntgcatttggttttaacacaagtgcca

SEQ ID NO: 1924 - protein, 323 aa, Homo sapiens
  MOD_RES (25)..(58): Variable amino acid
  MOD_RES (98)..(98): Variable amino acid
  MOD_RES (117)..(117): Variable amino acid
  MOD_RES (126)..(126): Variable amino acid
  MOD_RES (319)..(319): Variable amino acid
  MOD_RES (321)..(321): Variable amino acid
MCPMASQSLGWDLLQVSSVSAKSWXXXXXXXXXXXXXXXXXXXXXXXXXXXXXXXXXXLIALTLPRVYSTCAYMLSRTHCVHVIHAHMCVHVYHAHMXYMCIHAHMCVHVYTRTHVXHVYTRTHVXHVYHAHMCVHVYTRTHVRTCVYTHTCAYMCIHAHMCVHVYTRTHVRTCVYMCICIQVYIQVYMYTSVYVYVCVCIRVCMYTCVYMHTCVYTCVYMYTRVCIRVSVCIHIYRVYSVAQSIYTYMYTYIYVCIHIHVCIRIYGSIYTRMYTYIRMYTYIHACVHIYVCIHIYMHVYVYTYVYIYTRMYTYIVCLXLXQK

SEQ ID NO: 1925 - DNA, 1411 bp, Homo sapiens
  source
  (1)..(1411)
  CDS (201)..(1211)
  modified_base (722)..(722): a, t, c, g, unknown or other
  modified_base (1068)..(1069): a, t, c, g, unknown or other
  modified_base (1077)..(1176): a, t, c, g, unknown or other
gtgttcgttgttgtgcgcggtttggcgtgttttgcgctgtgtgtgtgcgttttcgagcttttgtggctgtggcgctgtttcggtctcttgtggcttgtttgctttttggggcgttgtcgagtctgttcttgttgggtgtttttgtgcggttgccgcgtgtttcctttgtcgtgtgttcgccgttgcgtcgtttggcgattatggcttgtttgtgttttgactttttgcgctgttggccgttccgcgtttgtagtgtgcggttgtttgtgttcgcgtttgtcgttttcgcgtgtgggccttttcgtttttgtgtttgcgtggttccgtgtttgggtgtcgcgttttgcgtgtttgctgtttctttggtctgttgcggtgtttgtttccgggtgtcggctgggtttttgggttggttcgttgtggcttgtggctggtgtgtgtgggtggtgtgttgcggttggtgtttcgttttgtggtttgtgttgcttgtcgttttcttgttcgtttgtgttgcggcgttttcttggttgtggggtttgggttttgtgtgtcggttggttgtgtgtggtttgtgttgtggtttgtttgttcgctttgggtttggttggccttttcgccttggttgttttttgttgttcggttttttttggtgtgtcttgttgccgtggttttgctttggtttggttgtttggtgttggttgtgtttgttgctttcttttttntttttggtcgcttgtgtgtgttgcttgcgtttgtttttttcgttgcttttttatgtcgcttttcttgttttggtttgctgtgtttgttttggtctcttgctttttttcgttggttttggttttttttcttccgtgggttccttgtgttgggttttttggttgggtttcgttcttggtctgtgttttggttgtgttgtggttcgttcgtcggttgggggggggggcctttgcttttttttgtttcccccccctttttgtttttgtgcgtgggttgtcgtaacaatttgggggtgttttggctgtggtggttttcttttaatcccccggtgtgtttttctctctattnntcgccagnnnnnnnnnnnnnnnnnnnnnnnnnnnnnnnnnnnnnnnnnnnnnnnnnnnnnnnnnnnnnnnnnnnnnnnnnnnnnnnnnnnnnnnnnnnnnnnnnnnngacagttgtattggagcttcgtccactgggtgtgagagcgccgcatcctctgaagcatcaagtagtgccgtcgttgtattcattcataaggtgcagcagtcccaggcggaggtcgtctgctaagcaacgtgatgagtgggccaatatacataaatcttagagtccatccgtggggttcataaatggcccatggagacgagaagtgagggaagcctaagcaaacagagatttggtt

SEQ ID NO: 1926 - protein, 336 aa, Homo sapiens
  MOD_RES (174)..(174): Variable amino acid
  MOD_RES (290)..(290): Variable amino acid
  MOD_RES (293)..(326): Variable amino acid
MACLCFDFLRCWPFRVCSVRLFVFAFVVFACGPFRFCVCVVPCLGVAFCVFAVSLVCCGVCFRVSAGFLGWFVVACGWCVWVVCCGWCFVLWFVLLVVFLFVCVAAFSWLWGLGFVCRLVVCGLCCGLFVRFGFGWPFRLGCFLLFGFFWCVLLPWFCFGLVVWCWLCLLLSFXFLVACVCCLRLFFSLLFYVAFLVLVCCVCFGLLLFFVGFGFFSSVGSLCWVFWLGFVLGLCFGCVVVRSSVGGGGLCFFLFPPPFCFCAWVVVTIWGCFGCGGFLLIPRCVFLSIXRQXXXXXXXXXXXXXXXXXXXXXXXXXXXXXXXXXXQLYWSFVHWV

SEQ ID NO: 1927 - DNA, 1567 bp, Homo sapiens
  source
  (1)..(1567)
  CDS (201)..(1367)
  modified_base (208)..(307): a, t, c, g, unknown or other
  modified_base (581)..(581): a, t, c, g, unknown or other
  modified_base (1167)..(1167): a, t, c, g, unknown or other
  modified_base (1186)..(1187): a, t, c, g, unknown or other
  modified_base (1220)..(1220): a, t, c, g, unknown or other
  modified_base (1241)..(1241): a, t, c, g, unknown or other
  modified_base (1259)..(1358): a, t, c, g, unknown or other
ctgaactcgcctaccccactaacatagtggctgcccctttggctgaagaggaacatgtgtcctcggccacttcaatcactgagtgtgacaaactttcttcctttgccacaacagtggctgagggcccatctgtggcctcacttacagctccccagacagaggagacaggcaagggggatactctagaggcgggaaccggcatgcaacnnnnnnnnnnnnnnnnnnnnnnnnnnnnnnnnnnnnnnnnnnnnnnnnnnnnnnnnnnnnnnnnnnnnnnnnnnnnnnnnnnnnnnnnnnnnnnnnnnnncgtttttctctgcgtgtctccgcggctttgtcactccgtttgtgggggttctccgaggcggttgtgttccttgggggggtgcccccctttgggggggtgttggttttccgcccctcgggttggtttaggggggtgtattgcccgctttcctgctcgcctttctgtgttttctgcgttgtccgcttctctttctgtgcggtgttctttggcgtttggtgcctttttttgtgtttttgcccctctgctctgccgcttgcgcgttcttttttcgttntgccctctttccgttcgggttttcgcgcgggttttttcctgtgtccccgctctttttccccgctccgggccagtggctctgtctttgctgtccttcgtggttcttcttctcgcggggttccctctcctcttctctgttttgccgggggttcctgggcgctttttctttcttccctggtttgtctttctcgccccgttggtttcttgggtctttccggttccttttttcctggcctttggcccccctctggtgtgggttggctggtttttcccgccttggccgggctcttgtcgtctttcttttcgccgttttctttccggggtttccgttgggtttttcttcgtggcctttttcttcctgtttccgttctccttttgccgctttgcctctctccggtggcttgttggtcccccttgctttcttgtggtggtgtttgtgtgtctccctggtggcttggtcccccgggtcttctcgggtctttttcctctccggggctggtctgccttgcttttctctcctgtttggtgggggggccgcgtcctctttccctctgctctcccctctgtgctttcgcctgtgcgcgtgncaactaaatttcctgtccnngccgcttcccttctccttcccctctatcgcggntggtgctgttgtccctatagnggccgagctctagtccannnnnnnnnnnnnnnnnnnnnnnnnnnnnnnnnnnnnnnnnnnnnnnnnnnnnnnnnnnnnnnnnnnnnnnnnnnnnnnnnnnnnnnnnnnnnnnnnnnngcttggtgaggcccgtgtttttttttcctgcgggatccgctcgtgttccaccgtttgggtcgcggggttttggggtgtcccgcgtcctttagtgcctcttttgtctttgcgttttgccgtttattttgtcccgcaggggcccgggcgagctcccttttgttctcgggtgggcggtgggcgcttcctctcccgggggttttggggggttg

SEQ ID NO: 1928 - protein, 388 aa, Homo sapiens
  MOD_RES (3)..(36): Variable amino acid
  MOD_RES (127)..(127): Variable amino acid
  MOD_RES (323)..(323): Variable amino acid
  MOD_RES (329)..(329): Variable amino acid
  MOD_RES (347)..(347): Variable amino acid
  MOD_RES (353)..(386): Variable amino acid
MQXXXXXXXXXXXXXXXXXXXXXXXXXXXXXXXXXXVFLCVSPRLCHSVCGGSPRRLCSLGGCPPLGGCWFSAPRVGLGGCIARFPARLSVFSALSASLSVRCSLAFGAFFCVFAPLLCRLRVLFSXCPLSVRVFARVFSCVPALFPRSGPVALSLLSFVVLLLAGFPLLFSVLPGVPGRFFFLPWFVFLAPLVSWVFPVPFFLAFGPPLVWVGWFFPPWPGSCRLSFRRFLSGVSVGFFFVAFFFLFPFSFCRFASLRWLVGPPCFLVVVFVCLPGGLVPRVFSGLFPLRGWSALLFSPVWWGGRVLFPSALPSVLSPVRVXTKFPVXAASLLLPLYRGWCCCPYXGRALVXXXXXXXXXXXXXXXXXXXXXXXXXXXXXXXXXXAW

SEQ ID NO: 1929 - DNA, 1360 bp, Homo sapiens
  source
  (1)..(1360)
  CDS (201)..(1160)
  modified_base (49)..(148): a, t, c, g, unknown or other
  modified_base (1162)..(1162): a, t, c, g, unknown or other
  modified_base (1215)..(1215): a, t, c, g, unknown or other
  modified_base (1235)..(1334): a, t, c, g, unknown or other
acgataaaggacaagaatggtagctgagagagagagagagcgacagacnnnnnnnnnnnnnnnnnnnnnnnnnnnnnnnnnnnnnnnnnnnnnnnnnnnnnnnnnnnnnnnnnnnnnnnnnnnnnnnnnnnnnnnnnnnnnnnnnnnncgtcctgtctgcctctccctcctcgtgtcttgccgcgatcgtgccttcgtggatgggtgtcgcggtttctccgctgtctctctctctctcccgtctctctcgccggtctgctcgtcgtacccttccctctctcccttttctcgtctctcgtgtcccttgttttgtttttctctcgcgtgcttgttctcgtctctgcggcttttcttcttttcctcctctccgttctctttctctgtttttctggacttccttctctcttgtccttcttctctccttccttattcccctttgtccttggtcgcctctcctctttcggcgttcttctatttcgtttccctctgtcgtcttcctgtcttttctcccgttgttctttcccttctctcccgctccttctgtctttcgttcctttctcctcttgctgtccgccttctttaatcctgttccccctctctctcccctgtttttctgtgctcttttcctcttccctgtgtcgtgtttctttctcgttcttcttctcttttctccgctcttcttggtctttctttcctctgcgcctcctcttgtcctctgttgttctcctctccccttctcttctcttcccctcccttctcctctgttccgccgtttttgccgcctctttctcttctgtttcctctttttctcctctttcccttcccttctccccttgcttttcccgcgccttttctccttcctgtctttcttttctcttccgctcttccttctcgtcccgcccttgttttctcctctctcgtccccgctctcctgctctgtctcttccctctctcttcctcttctctcccttcgcctccttcgctccttgtcttctctcggtcgtttctcttccaccctgttctgtcgctcttttcttctctgcctctcctctgtgcacgcttctttctctctccttgtttgtggcttcttcggggggggctctctcctcttttttaaaaatccccccctcgtttttcgttctgtgctgcgggtggtttaatntattccggtgggtctatacccgtgccgtggagaaagttttttttctgcccggntagattttgctgacccattnnnnnnnnnnnnnnnnnnnnnnnnnnnnnnnnnnnnnnnnnnnnnnnnnnnnnnnnnnnnnnnnnnnnnnnnnnnnnnnnnnnnnnnnnnnnnnnnnnnnggctcttggagacaggcatagacttc

SEQ ID NO: 1930 - protein, 319 aa, Homo sapiens
MGVAVSPLSLSLSRLSRRSARRTLPSLPFLVSRVPCFVFLSRACSRLCGFSSFPPLRSLSLFFWTSFSLVLLLSFLIPLCPWSPLLFRRSSISFPSVVFLSFLPLFFPFSPAPSVFRSFLLLLSAFFNPVPPLSPLFFCALFLFPVSCFFLVLLLFSPLFLVFLSSAPPLVLCCSPLPFSSLPLPSPLFRRFCRLFLFCFLFFSSFPSLLPLLFPRLFSFLSFFSLPLFLLVPPLFSPLSSPLSCSVSSLSLPLLSLRLLRSLSSLGRFSSTLFCRSFLLCLSSVHASFSLLVCGFFGGGSLLFFKNPPLVFRSVLRVV

SEQ ID NO: 1931 - DNA, 1240 bp, Homo sapiens
  source
  (1)..(1240)
  CDS (201)..(1040)
  modified_base (248)..(347): a, t, c, g, unknown or other
  modified_base (1088)..(1088): a, t, c, g, unknown or other
  modified_base (1125)..(1125): a, t, c, g, unknown or other
  modified_base (1172)..(1172): a, t, c, g, unknown or other
  modified_base (1174)..(1175): a, t, c, g, unknown or other
  modified_base (1219)..(1219): a, t, c, g, unknown or other
  modified_base (1222)..(1222): a, t, c, g, unknown or other
  modified_base (1234)..(1235): a, t, c, g, unknown or other
gttcagggagcttccaggtaggtggacacatgtgagtgtcagagagggtgtgcaagctctgggcccctttccacatgtcttgctctgtgtgtctcttctgtctggctgttatcctttaaatgagaaaccagtaaatataagtacagtgtttctctgagatctgtgaacctctctagcaaattaaacttaaggagggagtcatgagaaggactgatttaactaaatcgatcgggagtcgtgccaatctnnnnnnnnnnnnnnnnnnnnnnnnnnnnnnnnnnnnnnnnnnnnnnnnnnnnnnnnnnnnnnnnnnnnnnnnnnnnnnnnnnnnnnnnnnnnnnnnnnnnaggggggttttctccttcccccggtcttttttgggttttggggccctttttcctcttttctccgacccggggggtgctctttcccccctcctggcggtgtgttttttgcttgctgcgtttggccttcccttgggtttttcgattcgccctccccttggtggtatttggggcttcctgggtttgggttggtggggtagcctgtgtgtttttgccttggggttccctgtgggccctttcttttcccctttgccgcccgttgcgctttggggtttctctccgcgcccctttgcccttgtttttccctggggttggggtgcgagggttcccctccctaccttgcccgtttcccgggttgttttggcggtttgtattgcggtctcgcgttggtattttaactttgtgctttttgcctgttcccttggttggcggggttttgttggaattcccctgttttccgctgttgtccgggggtgccagcctttgtgtcctctttttcacctgacatgggtcccctgggttcacttgccttttgactcggcctcgacctcggggcaggttttttctttggtccttgtagggctcgccttggaattttgtttgcttgcccttctgccattcccctactctgtcttgtgtggcccctcccggaccctcttcccttttgtgctggtgtgctctacacacaccctttgagagtctggtcttgtttttgttcccttttcaggtccctcctcttttgtntgtgtgtatatctgtctgtctctctctcccgttcctnggttctctctcccctcctggtgctccttggtctcctcctcctcttantnntttttttttgtggtcgccctttcgctccttttggtttttttgcntgnctttcttccttnnggttt

SEQ ID NO: 1932 - protein, 279 aa, Homo sapiens
  MOD_RES (17)..(49): Variable amino acid
MRRTDLTKSIGSRANLXXXXXXXXXXXXXXXXXXXXXXXXXXXXXXXXXRGVFSFPRSFLGFGALFPLFSDPGGALSPLLAVCFLLAAFGLPLGFSIRPPLGGIWGFLGLGWWGSLCVFALGFPVGPFFSPLPPVALWGFSPRPFALVFPWGWGARVPLPTLPVSRVVLAVCIAVSRWYFNFVLFACSLGWRGFVGIPLFSAVVRGCQPLCPLFHLTWVPWVHLPFDSASTSGQVFSLVLVGLALEFCLLALLPFPYSVLCGPSRTLFPFVLVCSTHTL

SEQ ID NO: 1933 - DNA, 1315 bp, Homo sapiens
  source
  (1)..(1315)
  CDS (201)..(1115)
  modified_base (417)..(417): a, t, c, g, unknown or other
  modified_base (437)..(437): a, t, c, g, unknown or other
  modified_base (440)..(444): a, t, c, g, unknown or other
  modified_base (446)..(446): a, t, c, g, unknown or other
  modified_base (448)..(449): a, t, c, g, unknown or other
  modified_base (455)..(455): a, t, c, g, unknown or other
  modified_base (466)..(467): a, t, c, g, unknown or other
  modified_base (469)..(470): a, t, c, g, unknown or other
  modified_base (472)..(472): a, t, c, g, unknown or other
  modified_base (487)..(487): a, t, c, g, unknown or other
  modified_base (489)..(491): a, t, c, g, unknown or other
  modified_base (501)..(502): a, t, c, g, unknown or other
  modified_base (519)..(519): a, t, c, g, unknown or other
  modified_base (553)..(553): a, t, c, g, unknown or other
  modified_base (557)..(557): a, t, c, g, unknown or other
  modified_base (561)..(561): a, t, c, g, unknown or other
  modified_base (567)..(567): a, t, c, g, unknown or other
  modified_base (686)..(686): a, t, c, g, unknown or other
  modified_base (732)..(732): a, t, c, g, unknown or other
  modified_base (782)..(782): a, t, c, g, unknown or other
  modified_base (830)..(831): a, t, c, g, unknown or other
  modified_base (856)..(856): a, t, c, g, unknown or other
  modified_base (967)..(1066): a, t, c, g, unknown or other
  modified_base (1129)..(1129): a, t, c, g, unknown or other
tcaagaggatcccttacaccttttaatccctttccaaactgtattttttggaaggaagtcactgcgcacactcacatttaaaaagctgagagttataattcatttaagggggtgtccttagataatctgctaggaattcagcacagatttttctcttttccccagtttctttaataatttgataatttatttatgtcgatatgtgctcactgatatttcttttatactttgaattttcatcagtactaatttatttattttgttactcaaattaccacagctttggccatcagaggccctttcagttggcttctgtgtacattaatctatccaccctgccaattttctgtgtgtgctttcttcacctccttcctcctcctcctcctccgcctcttcttcttgtactacagcggggtnttttcttgtaccagggacgnagnnnnngngnnttgggnggtttttgggnngnngntttttgtttttttgngnnntcggggtggnntctgggggttgggtggntttgtgggttttgggccgtttgggggtgtttggngtgntttnggttgngggtggtttttttccccccccggggctgggtttttttttttgggggcccgcggcgggggccttgggtcttgcggttttttccgcggccccgttgttctgggccccccgggcttgttccngggttgtgtttgggtgggggggggtttttttgggtcttttctgggntttggggggccctgggggcctcctgcccccccgggggctttcttccgggncttctttggtttcttttgcctttggctgggcccgttcttgttctttgnngttctctggggggggggcggggggntttttttttccctcttttcccccttttcccttttgggggccccccccccgcgtttcggggctccccctggttttctttttttctttgggcctgtttcccggggggcctcgnnnnnnnnnnnnnnnnnnnnnnnnnnnnnnnnnnnnnnnnnnnnnnnnnnnnnnnnnnnnnnnnnnnnnnnnnnnnnnnnnnnnnnnnnnnnnnnnnnnncagcaatcatgcctgcaggtcgactctagaggatcccccacacctgtaatcccagcacttttnggaggccaaggcaagtggatcatctgaggtcaggaggtcgagaccagcctggccaacatggtgaaaccccgtctctagaaaaatacaaaaaattagctgggcatggtggcaggtgcctgtagccccagctacttgggtggctgaggcaggagaatcgcttgaacctggcaggtggaggttgcagtg

SEQ ID NO: 1934 - protein, 304 aa, Homo sapiens
  MOD_RES (73)..(73): Variable amino acid
  MOD_RES (80)..(83): Variable amino acid
  MOD_RES (89)..(91): Variable amino acid
  MOD_RES (96)..(97): Variable amino acid
  MOD_RES (101)..(101): Variable amino acid
  MOD_RES (107)..(107): Variable amino acid
  MOD_RES (118)..(119): Variable amino acid
  MOD_RES (121)..(121): Variable amino acid
  MOD_RES (123)..(123): Variable amino acid
  MOD_RES (178)..(178): Variable amino acid
  MOD_RES (210)..(211): Variable amino acid
  MOD_RES (219)..(219): Variable amino acid
  MOD_RES (256)..(289): Variable amino acid
MCSLIFLLYFEFSSVLIYLFCYSNYHSFGHQRPFQLASVYINLSTLPIFCVCFLHLLPPPPPPPLLLVLQRGXFLYQGRXXXXLGGFWXXXFCFFXXSGWXLGVGWXCGFWAVWGCLXXFXLXVVFFPPRGWVFFFGGPRRGPWVLRFFPRPRCSGPPGLVPGLCLGGGGFFWVFSGXWGALGASCPPGGFLPGLLWFLLPLAGPVLVLXXSLGGGRGXFFFPLFPLFPFGGPPPAFRGSPWFSFFLWACFPGGLXXXXXXXXXXXXXXXXXXXXXXXXXXXXXXXXXXSNHACRSTLEDPPHL

SEQ ID NO: 1935 - DNA, 1603 bp, Homo sapiens
  source
  (1)..(1603)
  CDS (201)..(1403)
  modified_base (415)..(415): a, t, c, g, unknown or other
  modified_base (489)..(489): a, t, c, g, unknown or other
  modified_base (528)..(627): a, t, c, g, unknown or other
  modified_base (639)..(639): a, t, c, g, unknown or other
  modified_base (649)..(649): a, t, c, g, unknown or other
  modified_base (655)..(661): a, t, c, g, unknown or other
  modified_base (677)..(677): a, t, c, g, unknown or other
  modified_base (1108)..(1108): a, t, c, g, unknown or other
  modified_base (1469)..(1469): a, t, c, g, unknown or other
  modified_base (1501)..(1501): a, t, c, g, unknown or other
  modified_base (1503)..(1503): a, t, c, g, unknown or other
  modified_base (1506)..(1603): a, t, c, g, unknown or other
cccagctgggcggtggtcgggtcgtgaggcgggagggcgggagcgggggaagggaaaagcaaaagcggggaaagaagccggggagcggtggaccagacattcagacctcctgaaaggctcgtgcggaggcagaggcgggatcttccggaggtgagaattgttttgttattgtagcagaatggggaggaattgaggggaaaatggagatagaacctgaaagagccccaaacgcgagaacgtgtagctccccaagtgtaagatctcacagaagaactagactgaaaactaggcgtctgggaagcctgaatccttggaagagtggcatcatcatgaccctctgtgttctcacttataagtgggagctgaatgatgagaatactggacagatagagtgggggggggacaacaccactcnagcctgcctaggttgggctggaaaaggaaagcctaaaagaagagctatggatgccggaatagtacctgggggtnggatgaactgggcacataccacatggtcaggtttatttnnnnnnnnnnnnnnnnnnnnnnnnnnnnnnnnnnnnnnnnnnnnnnnnnnnnnnnnnnnnnnnnnnnnnnnnnnnnnnnnnnnnnnnnnnnnnnnnnnnnattcattggggnaaaagaactnggtggnnnnnnnaaaacccccctctctncttggcgtttttcccgggaaccctggcgtgctccctcctgtttctggcctccgcagcgggtgggccatcggccctgttggtggcttacacgaggcaatggtgtgctcagttccgttcttctggtcactgggggcacgtcggggtccggaaaagagacctcacagctcactcacctggggaggagggggggggtatctctggtcgtgctccgtcctgtctctgtgcctcgccgagcttgtgtcccagtcagccctgttggtggtggcttgctcgatggctatggtgtgctcaggacctgttttcctgtctctggggctgttctcccgttcctgtccgaagctttcaatgactttaaactcctatctctttgttgtggcctcccgtggcttgttcgctttgtttgatcttcttctcggcgcctgtctgctttngctctttgtctgcgatctccttccgcgttgtagcttatcgttctgcgctgttccgcctgataattgctccttccccctttcctttcttctcctatgctttttcctttctccttctctctccctttccttccggtcccttcttctgcactttcttgcttcgtttgttgtcttttcacctcttgcttttcctgcgcttcctgttctccccccgttcccttccccctatttgttttctttcctcctctgccgttcccccgcatgccttcatccggtcccgtcggcccttacctcttaattttgtttcttgttctcctttctcctcctatgttatcttcggttgctccttttctctcttcgtatnagctcaaaacaatataaataacgctcctattntnttnnnnnnnnnnnnnnnnnnnnnnnnnnnnnnnnnnnnnnnnnnnnnnnnnnnnnnnnnnnnnnnnnnnnnnnnnnnnnnnnnnnnnnnnnnnnnnnnnn

SEQ ID NO: 1936 - protein, 400 aa, Homo sapiens
  MOD_RES (72)..(72): Variable amino acid
  MOD_RES (97)..(97): Variable amino acid
  MOD_RES (110)..(143): Variable amino acid
  MOD_RES (147)..(147): Variable amino acid
  MOD_RES (150)..(150): Variable amino acid
  MOD_RES (152)..(154): Variable amino acid
  MOD_RES (303)..(303): Variable amino acid
MEIEPERAPNARTCSSPSVRSHRRTRLKTRRLGSLNPWKSGIIMTLCVLTYKWELNDENTGQIEWGGDNTTXACLGWAGKGKPKRRAMDAGIVPGGXMNWAHTTWSGLFXXXXXXXXXXXXXXXXXXXXXXXXXXXXXXXXXXSLGXKNXVXXXKPPSLLGVFPGNPGVLPPVSGLRSGWAIGPVGGLHEAMVCSVPFFWSLGARRGPEKRPHSSLTWGGGGGYLWSCSVLSLCLAELVSQSALLVVACSMAMVCSGPVFLSLGLFSRSCPKLSMTLNSYLFVVASRGLFALFDLLLGACLLXLFVCDLLPRCSLSFCAVPPDNCSFPLSFLLLCFFLSPSLSLSFRSLLLHFLASFVVFSPLAFPALPVLPPFPSPYLFSFLLCRSPACLHPVPSALTS

SEQ ID NO: 1937 - DNA, 1051 bp, Homo sapiens
  source
  (1)..(1051)
  CDS (201)..(851)
  modified_base (1)..(80): a, t, c, g, unknown or other
  modified_base (89)..(89): a, t, c, g, unknown or other
  modified_base (93)..(94): a, t, c, g, unknown or other
  modified_base (98)..(100): a, t, c, g, unknown or other
  modified_base (102)..(106): a, t, c, g, unknown or other
  modified_base (118)..(118): a, t, c, g, unknown or other
  modified_base (122)..(122): a, t, c, g, unknown or other
  modified_base (150)..(151): a, t, c, g, unknown or other
  modified_base (153)..(153): a, t, c, g, unknown or other
  modified_base (357)..(357): a, t, c, g, unknown or other
  modified_base (393)..(393): a, t, c, g, unknown or other
  modified_base (405)..(405): a, t, c, g, unknown or other
  modified_base (437)..(437): a, t, c, g, unknown or other
  modified_base (756)..(756): a, t, c, g, unknown or other
  modified_base (836)..(836): a, t, c, g, unknown or other
  modified_base (839)..(839): a, t, c, g, unknown or other
  modified_base (988)..(988): a, t, c, g, unknown or other
  modified_base (1047)..(1051): a, t, c, g, unknown or other
nnnnnnnnnnnnnnnnnnnnnnnnnnnnnnnnnnnnnnnnnnnnnnnnnnnnnnnnnnnnnnnnnnnnnnnnnnnnnnnngagttgacntttnnggcnnncnnnnntttttcggggtnaagnggcgactttcgttttgtcgcctgcctcnngnctaagaatacgcctcttactggtgttctctgtattttctgaatttgcatgttgggggggctcgctaggttggggaagatatcctgggtaatatccagaagtgtgttttccagcttgtttccattctccccatgtccttcaggtaggtactccagtcaatcattggttcggtctttttacgagatcttttatttcttggaggctntgttattggggggggggctttattctctacccttcncttcctgccttntttcgggggggggggggggcgcacctctcctntgctttttttccgtttggttgatttgtgtattgcttcgttgtgtatgctttctcgcggttgttagtgctgtggctttcctcttccctgggggttgttttcgctcctcccctgcgccggtgttgcctcgtggctcggcctttggctgttctctggtcttggggcgcttcccctcccggcgcccttgtggcggtatggtttggtgtcgtgcgggtgtgggggtcttgtggttcgtccgtgctcctttcctccccgccgatcgccttttcctttccgcggttccgcctattttttttccccctaattccgttgtaagtgcgngcgcccgcccccttcgttgttgtgaatatgttgtttgggggttccgttgtgggttgttcaggggtgccgtgctactcgcnggngcggtcttgtgaccttgttccctgtgttgttgtccgcgcccctcttgtctcgtgggcccccggtgttgtcggggcgttgctactatgcagtccgtgcgactgtcgcgttcaccacctcgatctccggtgatcgcttcgggtttgtttgnatcctcggccggttcccttacaaccatatttgatcacgttgaaccatgacctaatgcannnnn

SEQ ID NO: 1938 - protein, 216 aa, Homo sapiens
  MOD_RES (53)..(53): Variable amino acid
  MOD_RES (65)..(65): Variable amino acid
  MOD_RES (69)..(69): Variable amino acid
  MOD_RES (186)..(186): Variable amino acid
MLGGLARLGKISWVISRSVFSSLFPFSPCPSGRYSSQSLVRSFYEIFYFLEAXLLGGGLYSLPFXSCLXSGGGGGAPLLCFFSVWLICVLLRCVCFLAVVSAVAFLFPGGCFRSSPAPVLPRGSAFGCSLVLGRFPSRRPCGGMVWCRAGVGVLWFVRAPFLPADRLFLSAVPPIFFPPNSVVSAXARPLRCCEYVVWGFRCGLFRGAVLLAGAVL

SEQ ID NO: 1939 - DNA, 1453 bp, Homo sapiens
  source
  (1)..(1453)
  CDS (201)..(1253)
  modified_base (1)..(190): a, t, c, g, unknown or other
  modified_base (208)..(208): a, t, c, g, unknown or other
  modified_base (218)..(218): a, t, c, g, unknown or other
  modified_base (460)..(461): a, t, c, g, unknown or other
  modified_base (463)..(464): a, t, c, g, unknown or other
  modified_base (466)..(466): a, t, c, g, unknown or other
  modified_base (481)..(481): a, t, c, g, unknown or other
  modified_base (501)..(501): a, t, c, g, unknown or other
  modified_base (669)..(669): a, t, c, g, unknown or other
  modified_base (736)..(736): a, t, c, g, unknown or other
  modified_base (747)..(747): a, t, c, g, unknown or other
  modified_base (768)..(768): a, t, c, g, unknown or other
  modified_base (844)..(844): a, t, c, g, unknown or other
  modified_base (1028)..(1028): a, t, c, g, unknown or other
  modified_base (1083)..(1182): a, t, c, g, unknown or other
  modified_base (1201)..(1202): a, t, c, g, unknown or other
  modified_base (1213)..(1213): a, t, c, g, unknown or other
nnnnnnnnnnnnnnnnnnnnnnnnnnnnnnnnnnnnnnnnnnnnnnnnnnnnnnnnnnnnnnnnnnnnnnnnnnnnnnnnnnnnnnnnnnnnnnnnnnnnnnnnnnnnnnnnnnnnnnnnnnnnnnnnnnnnnnnnnnnnnnnnnnnnnnnnnnnnnnnnnnnnnnnnnnnnnnnnnnnnnnnnnnnnnnatccctggtcatgctgcngcgtaccgcnactctgaaggacgccagcagattctaccctttctccacaacaccatcttttgcctctatcagtggtttatctatcttgtggaatagtcacattcttatgtgtcttgcaaccacatccagctgttggtccctggaggcagtgtgtctcatacatttttggacccttcactcaagatctttgtgtcttgctgcttgctcggagtataccacgtgctcactgtgtaaagtgggaggtgtgtttgnntnntnagtgttggggttttnggggtgtcctctcgtgtggnggtgtcggggtccccccctttggtgggtttttggttgccccgtgggtcgtgggggtgtcggcgggggggggggggtggggggggggggccccctcgctctctgtttttgtgtctgggggtgtggcgtgtgtgcgtgttcctccccctccggggggggcgcggccgggnttgcggcgcggtgtcggcgccggggcgcgtggttggcgggctttctgcgttctttcccctttcttcncgggggcgggncgggtcgctttcgtcgttgcnggcgcccgccgggcgggtcgtctgcttgtctttttgttggggtggtggttcggtcttttctctggttgcgttgtcnttgtttgtttgttcgttttgcgtggcgctgtgtctgcgcccggcggcgtggtgtgtgtgtcttttttttgcggcgttctgtgcgcgccgccgtcgcgcgggggcgggcggggtggcggtgtgtttttgcgtgtgttattgtttgtgggggggtgttgccttgctttgtgttttttcgtgctgtntctgttgcggtgtgctgtggtgtgggtgttgtaaaaaaaaaaaaaaaattatgtnnnnnnnnnnnnnnnnnnnnnnnnnnnnnnnnnnnnnnnnnnnnnnnnnnnnnnnnnnnnnnnnnnnnnnnnnnnnnnnnnnnnnnnnnnnnnnnnnnnnacctcaaggctgcgatgcnncgtcgggcggnctctaaaggacaccctctcttggtttttcattgtatataaagttcaggcctaatatgcctgtcgcaactaaaaagaagagtgatctggtgtggcaatattggagtaattcttttattatcatagatttgatgttacaaagattttttcaaacttttcttcatgaagttttatgaattttaggttttctcttaagtgtctgatctattttgaatgagttcttatatatagtgtcaggtatg

SEQ ID NO: 1940 - protein, 350 aa, Homo sapiens
  MOD_RES (3)..(3): Variable amino acid
  MOD_RES (87)..(89): Variable amino acid
  MOD_RES (94)..(94): Variable amino acid
  MOD_RES (101)..(101): Variable amino acid
  MOD_RES (157)..(157): Variable amino acid
  MOD_RES (179)..(179): Variable amino acid
  MOD_RES (183)..(183): Variable amino acid
  MOD_RES (190)..(190): Variable amino acid
  MOD_RES (215)..(215): Variable amino acid
  MOD_RES (295)..(328): Variable amino acid
  MOD_RES (334)..(334): Variable amino acid
  MOD_RES (338)..(338): Variable amino acid
MLXRTATLKDASRFYPFSTTPSFASISGLSILWNSHILMCLATTSSCWSLEAVCLIHFWTLHSRSLCLAACSEYTTCSLCKVGGVFXXXVLGFXGCPLVWXCRGPPLWWVFGCPVGRGGVGGGGGVGGGGPLALCFCVWGCGVCACSSPSGGGAAGXAARCRRRGAWLAGFLRSFPFLXGGGXGRFRRCXRPPGGSSACLFVGVVVRSFLWLRCXCLFVRFAWRCVCARRRGVCVFFLRRSVRAAVARGRAGWRCVFACVIVCGGVLPCFVFFRAVSVAVCCGVGVVKKKKKLCXXXXXXXXXXXXXXXXXXXXXXXXXXXXXXXXXXLKAAMXRRAXSKGHPLLVFHCI

SEQ ID NO: 1941 - DNA, 1297 bp, Homo sapiens
  source
  (1)..(1297)
  CDS (201)..(1097)
  modified_base (1)..(58): a, t, c, g, unknown or other
  modified_base (89)..(89): a, t, c, g, unknown or other
  modified_base (93)..(93): a, t, c, g, unknown or other
  modified_base (110)..(110): a, t, c, g, unknown or other
  modified_base (275)..(275): a, t, c, g, unknown or other
  modified_base (280)..(280): a, t, c, g, unknown or other
  modified_base (710)..(710): a, t, c, g, unknown or other
  modified_base (943)..(1042): a, t, c, g, unknown or other
  modified_base (1076)..(1076): a, t, c, g, unknown or other
nnnnnnnnnnnnnnnnnnnnnnnnnnnnnnnnnnnnnnnnnnnnnnnnnnnnnnnnnnattggtgttggggagtgacaggatgggcagngcgntgcctgctctgaggatnccgaaacgtgaagtcattatgaaatatactatttaatgcttgtctgaaaaggttggttttgctattaccttaatgatgagtccatagtgaatgacaacgagtacatttttaaacataattttgcttcttaataaagaggttcttactaaaggggttctttatttncgttntatctgttttttttttggcgcgcgccccttctctggggggggggggttcttgtgttttgtgggggggatggatcttgttcggtgggggttcgtgttcctggcgttcgcggcttgggctcgtttcttttgctgggtagtgtgtatcgtgtgggcttgtgttgtggttgcccgggggttgtttgtgtgtgtgggggggtttgttttctgcggattgttctcttgttccgtcttctgttcgggtgtgggtggctgtcggtggcggggcgttgtgttgtgtttgtgttcggtggcctgtgtcgggttcgtgtgttctagctggcgcgcctgctttgttgggtggctcggtgtgccgccgttgtgctgtggttgttgttgtgttgtggtcggggggtgctccgcggttggggtctcgcggcgcgtggttttgtgnggcctcttttgcgccgccgtccggtttttcgggtgggtattttgcccgcggtttgtcccgcttcgggcccttcccccctttgttgtggctgttttgccgggccatccaatatgttccgcttgtgtactcctttgtgggcggcgcattccgtgttttttgttttcgcgcgggctgtttctgggctggtgggcgctcgttgtattccgcccgcttgctggaaacggaaataaatnnnnnnnnnnnnnnnnnnnnnnnnnnnnnnnnnnnnnnnnnnnnnnnnnnnnnnnnnnnnnnnnnnnnnnnnnnnnnnnnnnnnnnnnnnnnnnnnnnnngactggggttgctagactgcggtgcggctctagnaggatccctttttttttttgagacggattctcgctctgtcccccaggctggagtgcagtggtgcgatctcggctcactgcaaactccacctcccgggttcatgccattctcctgcctcagcctcccgagtagctgagactacaggcgcccgccaccacgcccggctaagttttttgtattttattagagacgggggtttcaccgtgttagccaggatggtc

SEQ ID NO: 1942 - protein, 298 aa, Homo sapiens
  MOD_RES (25)..(25): Variable amino acid
  MOD_RES (27)..(27): Variable amino acid
  MOD_RES (170)..(170): Variable amino acid
  MOD_RES (248)..(281): Variable amino acid
  MOD_RES (292)..(292): Variable amino acid
MTTSTFLNIILLLNKEVLTKGVLYXRXICFFFGARPFSGGGGFLCFVGGMDLVRWGFVFLAFAAWARFFCWVVCIVWACVVVARGLFVCVGGFVFCGLFSCSVFCSGVGGCRWRGVVLCLCSVACVGFVCSSWRACFVGWLGVPPLCCGCCCVVVGGCSAVGVSRRVVLXGLFCAAVRFFGWVFCPRFVPLRALPPFVVAVLPGHPICSACVLLCGRRIPCFLFSRGLFLGWWALVVFRPLAGNGNKXXXXXXXXXXXXXXXXXXXXXXXXXXXXXXXXXXTGVARLRCGSXRIPFFF

SEQ ID NO: 1943 - DNA, 1324 bp, Homo sapiens
  source
  (1)..(1324)
  CDS (201)..(1124)
  modified_base (28)..(127): a, t, c, g, unknown or other
  modified_base (139)..(139): a, t, c, g, unknown or other
  modified_base (143)..(144): a, t, c, g, unknown or other
  modified_base (152)..(152): a, t, c, g, unknown or other
  modified_base (352)..(352): a, t, c, g, unknown or other
  modified_base (371)..(371): a, t, c, g, unknown or other
  modified_base (383)..(384): a, t, c, g, unknown or other
  modified_base (389)..(389): a, t, c, g, unknown or other
  modified_base (407)..(407): a, t, c, g, unknown or other
  modified_base (456)..(456): a, t, c, g, unknown or other
  modified_base (476)..(476): a, t, c, g, unknown or other
  modified_base (514)..(514): a, t, c, g, unknown or other
  modified_base (531)..(531): a, t, c, g, unknown or other
  modified_base (986)..(986): a, t, c, g, unknown or other
  modified_base (1092)..(1092): a, t, c, g, unknown or other
  modified_base (1133)..(1232): a, t, c, g, unknown or other
  modified_base (1269)..(1269): a, t, c, g, unknown or other
gaaattataagggcccatggggctcaannnnnnnnnnnnnnnnnnnnnnnnnnnnnnnnnnnnnnnnnnnnnnnnnnnnnnnnnnnnnnnnnnnnnnnnnnnnnnnnnnnnnnnnnnnnnnnnnnnnctccatgcttgncagnnccgggtgncgactctaaggatacctgcgcaatgatcctgtgctggtaattctacacatgcagaaactcaaagttgaaaggaaccttaaaattgatcttgctcgatgccctcacttcaaagtttgtacgtggcccaacatttatatgttgttgttggtatatgtgtgtgttcttagaatttgttacctagattttttttttgttatggngttttgctcttgttgcccngggtggggtgcnntgggncgatctcggctcactgcngcctccgcctctgggttcgggcggttctcctgcctcggcctgcgcggtngctggggtgtcgggcttgcncctgcgcgcccggctgcttttttgtgtttgtggtcgtnccggggggtgttcctgntgctgcgggttggtccgggctgcgtggcgtggcgggccggcgggggtgtcgtcttctgtctttgggctgccgcgcggggggcccggtgcccgttctgcttctgtcctgtctcctttcgcttctttttcgccccccgccctgccccgcgggcggcgctggcgtcttcccccggggtgtgtgcgcccgcgcgcgtccgggtgtgggtcgcgtcccgcgggcccggggttgttttttttctcggttttttgttctttttgcgcctctttgtgctggcgggcggttgtgtggtggggcgtctgtcggcgttgccggtgcggcgtcctgtgttgttgcgtgtggtgtgctggtcttgctcgtctgtggctgccccctcgctctccgtctcgctgtgttggccttctctcgcgcgcgcggccccgtgcctctgggcggtgcgcggcggcggtgctgggctnttctcctgttcttcgttccctgcctgctggcttgtcctcgttggctcgtccttggttcggtggtgcttggtgcgggtggctcgctgcgtgtcgtgcggcgccggtnctctgttttcgatgatagtgaaatatatataaataaaaatnnnnnnnnnnnnnnnnnnnnnnnnnnnnnnnnnnnnnnnnnnnnnnnnnnnnnnnnnnnnnnnnnnnnnnnnnnnnnnnnnnnnnnnnnnnnnnnnnnnnaccttagggcttgacagacctgccttgcggctctagnagatcccctggcaatctaaattgtggggacattctctacacattttgatggcatt

SEQ ID NO: 1944 - protein, 307 aa, Homo sapiens
  MOD_RES (51)..(51): Variable amino acid
  MOD_RES (62)..(62): Variable amino acid
  MOD_RES (86)..(86): Variable amino acid
  MOD_RES (105)..(105): Variable amino acid
  MOD_RES (111)..(111): Variable amino acid
  MOD_RES (298)..(298): Variable amino acid
MQKLKVERNLKIDLARCPHFKVCTWPNIYMLLLVYVCVLRICYLDFFFVMXFCSCCPGWGAXGRSRLTAASASGFGRFSCLGLRGXWGVGLAPARPAAFLCLWSXRGVFLXLRVGPGCVAWRAGGGVVFCLWAAARGARCPFCFCPVSFRFFFAPRPAPRAALASSPGVCAPARVRVWVASRGPGVVFFLGFLFFLRLFVLAGGCVVGRLSALPVRRPVLLRVVCWSCSSVAAPSLSVSLCWPSLARAAPCLWAVRGGGAGLFSCSSFPACWLVLVGSSLVRWCLVRVARCVSCGAGXLFSMIVKYI

SEQ ID NO: 1945 - DNA, 1225 bp, Homo sapiens
  source
  (1)..(1225)
  CDS (201)..(1025)
  modified_base (1)..(60): a, t, c, g, unknown or other
  modified_base (72)..(72): a, t, c, g, unknown or other
  modified_base (77)..(77): a, t, c, g, unknown or other
  modified_base (99)..(99): a, t, c, g, unknown or other
  modified_base (274)..(274): a, t, c, g, unknown or other
  modified_base (333)..(333): a, t, c, g, unknown or other
  modified_base (353)..(353): a, t, c, g, unknown or other
  modified_base (760)..(760): a, t, c, g, unknown or other
  modified_base (865)..(865): a, t, c, g, unknown or other
  modified_base (942)..(942): a, t, c, g, unknown or other
  modified_base (1040)..(1139): a, t, c, g, unknown or other
nnnnnnnnnnnnnnnnnnnnnnnnnnnnnnnnnnnnnnnnnnnnnnnnnnnnnnnnnnnnctccaagcttgncagcnctgccgtgcgctctagaggatnactgttcacctgaggtcaggagttcgagtactagcctgaccaacatagagaaaccccgtctccactaaaaatagaaaaaaattagccaggcgtggtggtaaatgcctgtaatcccagctacttgggaggctaggcaggagaagcgcttgaacctgggaggtggaggttgcggtgngccgtgttctttctcttgcgctccggcctgggcggggggggtgtgtctccttctctttnttgtcttttttgtttctttngtctgtggctttcgcgttggggtttcttgctcccggtttttcgctccttctttcccttgtggtctccccctcttttctcgttgtgtttgtgtctttctttttttttgttgtgtctctcgtcccgggttgtttttttttctggtttcttcgtgccttcgcctcgtcttttcgtctgtggttttcgcgttcttgtttgtttttttgttttttgttttcggttttcttcttgttgtttgtcttcggtgtttcggtcttgtttttgtctgtgtggtggttctctgcggcctccttctcctgtctctctgttttgctctttgtgtcttcttctcgttctctttttctttcttttctttgttcgccgttttcgcggtggcgtgcgctcgttttgttgtttgtgtgtgttgcgntggttgtgtcttgtgtgcgttgtccggctttctgcgtgtttctttccgtctggtggttcttttgtttttctggctgtttgtgggttgtgttgtggcccgcggctntggtctgggttcttgttcttgtgttttgtctttgttcggttggggcggtgtcttcgctgctgctcgtgcgtgggttnctgtcgctgtgtgtggtttgttcgtgttctgttggctcgcgtgtgctctcctgtggtctcctgtttgtcggctcgaattatgaaaagacaaaaaaggnnnnnnnnnnnnnnnnnnnnnnnnnnnnnnnnnnnnnnnnnnnnnnnnnnnnnnnnnnnnnnnnnnnnnnnnnnnnnnnnnnnnnnnnnnnnnnnnnnnncgctaggacttgacatgcctcgcgttgcgactctagaagatccccttcaggtcccgttagtgggcgccagtccttccttcaaccat

SEQ ID NO: 1946 - protein, 274 aa, Homo sapiens
  MOD_RES (25)..(25): Variable amino acid
  MOD_RES (45)..(45): Variable amino acid
  MOD_RES (51)..(51): Variable amino acid
  MOD_RES (187)..(187): Variable amino acid
  MOD_RES (222)..(222): Variable amino acid
  MOD_RES (248)..(248): Variable amino acid
MPVIPATWEARQEKRLNLGGGGCGXPCSFSCAPAWAGGVCLLLFXVFFVSXVCGFRVGVSCSRFFAPSFPCGLPLFSRCVCVFLFFCCVSRPGLFFFLVSSCLRLVFSSVVFAFLFVFLFFVFGFLLVVCLRCFGLVFVCVVVLCGLLLLSLCFALCVFFSFSFSFFSLFAVFAVACARFVVCVCCXGCVLCALSGFLRVSFRLVVLLFFWLFVGCVVARGXGLGSCSCVLSLFGWGGVFAAARAWVXVAVCGLFVFCWLACALLWSPVCRLEL

SEQ ID NO: 1947 - DNA, 1003 bp, Homo sapiens
  source
  (1)..(1003)
  CDS (201)..(803)
  modified_base (130)..(130): a, t, c, g, unknown or other
  modified_base (244)..(244): a, t, c, g, unknown or other
  modified_base (417)..(417): a, t, c, g, unknown or other
  modified_base (428)..(428): a, t, c, g, unknown or other
  modified_base (830)..(929): a, t, c, g, unknown or other
  modified_base (954)..(954): a, t, c, g, unknown or other
aagccaagccaggcatggtggctcacacccatactcccaccactttgggaggctgaggtgggaagattggttaagctcaggagttcgagaccagcctgggcaacatagggagacccatctctaattccanaggccaggaactgggcgcggtggctctcacctgtaatcccggcgctctgggcggcctcggctggcgggtcatgtgtggtgcggcgtgtccggggggtctggcgggtgtggtttnttttctctgtgcctggtggttttttggtgcttcccctctctggcgcttggttgggggtgcggctttggccgggggttgtctcggtggggtggttggtggtggcgttttgttgggtggtggttgtgggctttgttcttttctttgctttgtttttttttctctttgttttttgnttgtttgtttntttgttctttgtgttttgtcttcggcgcgtgcgttgtcgttccttcttgccctccccgcggctgtgtctgtggcgctctgtggtggctgcgggcggctgtgggtgggcggcgccgctggtgtcggctgcgtcgcggggctctccgcgttctgcgctcgcgcttgcgtctctcgggctgtctggtggccgtggtgcggtggtcctggttttgtctcgcgcgcgcttgctgttggggtgtcgttgcgcttgggttcgcgcgtggtgtgcgtgtgtgcgcttcttctggtgcggtttcctctctctgtcgtcgtccttcttccgcgcccgttgttgtcgtctggtggtcgtgtctcgccggctgcggctctcgcttgaggaagcaaatagaagaaaaaaagaagnnnnnnnnnnnnnnnnnnnnnnnnnnnnnnnnnnnnnnnnnnnnnnnnnnnnnnnnnnnnnnnnnnnnnnnnnnnnnnnnnnnnnnnnnnnnnnnnnnnnacctcagacttgatgcgctgctggngcgactctaaagaccccctgcgttcttatcttgccgggaggagaactgg

SEQ ID NO: 1948 - protein, 200 aa, Homo sapiens
  MOD_RES (15)..(15): Variable amino acid
  MOD_RES (73)..(73): Variable amino acid
  MOD_RES (76)..(76): Variable amino acid
MCGAACPGGLAGVVXFLCAWWFFGASPLWRLVGGAALAGGCLGGVVGGGVLLGGGCGLCSFLCFVFFSLCFLXVCXFVLCVLSSARALSFLLALPAAVSVALCGGCGRLWVGGAAGVGCVAGLSAFCARACVSRAVWWPWCGGPGFVSRALAVGVSLRLGSRVVCVCALLLVRFPLSVVVLLPRPLLSSGGRVSPAAALA

SEQ ID NO: 1949 - DNA, 1243 bp, Homo sapiens
  source
  (1)..(1243)
  CDS (201)..(1043)
  modified_base (26)..(126): a, t, c, g, unknown or other
  modified_base (142)..(142): a, t, c, g, unknown or other
  modified_base (385)..(385): a, t, c, g, unknown or other
  modified_base (421)..(421): a, t, c, g, unknown or other
  modified_base (425)..(425): a, t, c, g, unknown or other
  modified_base (473)..(473): a, t, c, g, unknown or other
  modified_base (512)..(512): a, t, c, g, unknown or other
  modified_base (719)..(719): a, t, c, g, unknown or other
  modified_base (803)..(803): a, t, c, g, unknown or other
  modified_base (817)..(817): a, t, c, g, unknown or other
  modified_base (850)..(850): a, t, c, g, unknown or other
  modified_base (884)..(884): a, t, c, g, unknown or other
  modified_base (906)..(907): a, t, c, g, unknown or other
  modified_base (913)..(916): a, t, c, g, unknown or other
  modified_base (921)..(921): a, t, c, g, unknown or other
  modified_base (923)..(924): a, t, c, g, unknown or other
  modified_base (926)..(926): a, t, c, g, unknown or other
  modified_base (939)..(939): a, t, c, g, unknown or other
  modified_base (947)..(947): a, t, c, g, unknown or other
  modified_base (968)..(968): a, t, c, g, unknown or other
  modified_base (975)..(975): a, t, c, g, unknown or other
  modified_base (988)..(988): a, t, c, g, unknown or other
  modified_base (992)..(996): a, t, c, g, unknown or other
  modified_base (1004)..(1005): a, t, c, g, unknown or other
  modified_base (1009)..(1011): a, t, c, g, unknown or other
  modified_base (1015)..(1015): a, t, c, g, unknown or other
  modified_base (1024)..(1025): a, t, c, g, unknown or other
  modified_base (1062)..(1161): a, t, c, g, unknown or other
  modified_base (1179)..(1179): a, t, c, g, unknown or other
  modified_base (1195)..(1195): a, t, c, g, unknown or other
ccttgtactgatatagaagaaagatnnnnnnnnnnnnnnnnnnnnnnnnnnnnnnnnnnnnnnnnnnnnnnnnnnnnnnnnnnnnnnnnnnnnnnnnnnnnnnnnnnnnnnnnnnnnnnnnnnnnngcgttagcttgcaagnctgcggtcgagtctaaagcatcccttatgggtgtgcatgtgtttattcatgcatcctcatgtacaggtgtgtgtgtgcttatgcatgtgtccccgtgtacaagggtgtgtgtgtgtgtttatgcatgcattcccatgtacagaggtgtgtatgcatgtttatgcatgcatcctggtgtacaagggtgggtgtgtgtgtgtatgcatgcatccccatgtacaggtgtgtgtgtgtgtttatgcncgtatccctgtgtacagggatgtgtgtccatgtttntgcntgcgtccccatgtcccggtgtgtgtgtgtgtttatgcacgtgtccccntgtcccggttgtgtgtgtgtgtttccgcccctgtcctcntgttctggtgggtgcgggtgtttgtgcggtgcgttcccctgtcccggtgtgtcggtgtggtctctgcgcgtgtcccctccccccgcgcggcccccgtccctccctttcctccccttctcccctctgttttgtggtttcggcccggtgcgtcctccctgcgcgcgcccgcggtgttgggtgttggtttcgtcccccgccgtcgttgtngcggccgcgggtttcccccccctctttgcctccgctttttttccctctgttcttgtgctccctcctcgccgctcgtccgttttnctctttttttgtcntccccccttctcttctcttcgtggtttttctcntttcttttgcttgttcttttttccgccctttttnttttttcgttcttttttttccnngcgggnnnnccgtntnngngttgtgttctctncgtttttntgcgttctctttttttttttnaaatttntttttgtgttttntgtnnnnntttgcggnngggnnntttntctgttgtnnttttttgtttttttataaaaaaaataaatctttttannnnnnnnnnnnnnnnnnnnnnnnnnnnnnnnnnnnnnnnnnnnnnnnnnnnnnnnnnnnnnnnnnnnnnnnnnnnnnnnnnnnnnnnnnnnnnnnnnnnactgagctatgcataccngcgcttcggctctagnagatccccatatagtgagatcccattcctatcaaactaatctctgtat

SEQ ID NO: 1950 - protein, 280 aa, Homo sapiens
  MOD_RES (62)..(62): Variable amino acid
  MOD_RES (74)..(74): Variable amino acid
  MOD_RES (201)..(201): Variable amino acid
  MOD_RES (206)..(206): Variable amino acid
  MOD_RES (217)..(217): Variable amino acid
  MOD_RES (228)..(228): Variable amino acid
  MOD_RES (236)..(236): Variable amino acid
  MOD_RES (238)..(239): Variable amino acid
  MOD_RES (241)..(242): Variable amino acid
  MOD_RES (247)..(247): Variable amino acid
  MOD_RES (249)..(249): Variable amino acid
  MOD_RES (256)..(256): Variable amino acid
  MOD_RES (259)..(259): Variable amino acid
  MOD_RES (263)..(263): Variable amino acid
  MOD_RES (265)..(266): Variable amino acid
  MOD_RES (269)..(272): Variable amino acid
  MOD_RES (275)..(275): Variable amino acid
MYRCVCAYACVPVYKGVCVCLCMHSHVQRCVCMFMHASWCTRVGVCVYACIPMYRCVCVFMXVSLCTGMCVHVXACVPMSRCVCVFMHVSPCPGCVCVFPPLSSCSGGCGCLCGAFPCPGVSVWSLRVSPPPARPPSLPFLPFSPLFCGFGPVRPPCARPRCWVLVSSPAVVVAAAGFPPLFASAFFPSVLVLPPRRSSVXLFFCXPPFSSLRGFSXFFCLFFFPPFXFFRSFFSXRXXRXXVVFSXFXCVLFFFXKFXFVFXVXXCGXXXXLLXFFVFL

SEQ ID NO: 1951 - DNA, 1282 bp, Homo sapiens
  source
  (1)..(1282)
  CDS (201)..(1082)
  modified_base (240)..(240): a, t, c, g, unknown or other
  modified_base (261)..(261): a, t, c, g, unknown or other
  modified_base (856)..(955): a, t, c, g, unknown or other
  modified_base (967)..(967): a, t, c, g, unknown or other
  modified_base (969)..(969): a, t, c, g, unknown or other
  modified_base (990)..(990): a, t, c, g, unknown or other
  modified_base (995)..(995): a, t, c, g, unknown or other
  modified_base (1013)..(1013): a, t, c, g, unknown or other
  modified_base (1033)..(1033): a, t, c, g, unknown or other
  modified_base (1156)..(1156): a, t, c, g, unknown or other
  modified_base (1185)..(1185): a, t, c, g, unknown or other
  modified_base (1192)..(1192): a, t, c, g, unknown or other
  modified_base (1196)..(1196): a, t, c, g, unknown or other
  modified_base (1212)..(1213): a, t, c, g, unknown or other
  modified_base (1222)..(1222): a, t, c, g, unknown or other
  modified_base (1252)..(1252): a, t, c, g, unknown or other
ctaattgttcttggtcaaagacattacctggcatttgatcttcagacaggcctcttgcagtaaatgcatttcagattcaattgggaagctcagtgatctcatagaagcataataaagacatcacttgcccagaacccctgaggttagagtgtcctagaaggattaaaagccatttcactgaatgttcttcttcaaagtgaatgaatattccaatgagtacagctgtttttttaagtggtngcttgatttactgttctgatnagtctgctgaagtgtgtttgacccttctcagagatttagcaggctttccaccttgtttgcgccttcttccccggattgctggatttatcctctccttgctgctgctgttgctattcgggcctccgcctgttgtgggttcattctcgttgcgctctccttgtcgcccccctcccggtttcgctccttctgctccgtgcctttgctcccgcgtcctcttttctgctctcgcgctgcgcgcttgctctgttttgggtgcccgggtccctccctctttgttttttttcgtcgctgcccctcgttcctttttggggccctttctgttttttttttgttttgggtctcttccgggttcctcgttttttttcttcgccctttgtgttctgttgttttgggcgctcttcggccccctcgtgtgtgtttttgcttcgttcttcccgcgtggtctggctttttcttcccgcccttgccgcgtcgtggtcttctcttgtctgtgtctcgctcttgcccccgtgcgtttccgtgtcttttgctcggcgcgccttgtggtttttctccttctcggtccggtcgatgacaaaactaaaaaaataaaatnnnnnnnnnnnnnnnnnnnnnnnnnnnnnnnnnnnnnnnnnnnnnnnnnnnnnnnnnnnnnnnnnnnnnnnnnnnnnnnnnnnnnnnnnnnnnnnnnnnnatcccctgatcngntacaggctgcatcgcgcctgnggagngcattcttatcctcgaanaagcctttgtttgtcatgtngcttgtgataaccacattgttgcctttggcttgcggcactgcgaagtgagagtaagtgaatgtcacatcgtttggatcaagacccatttgcagcacaagccctgttttgttcagcggcttgtnagggccggtttatagagtttgatacatanccaagcntgtnaatatcgtttgagttnntaccatcgntcgtcattagtgaaccgcgtgattctgtgnacttgtcccatttgccgttctttttgaaaa

SEQ ID NO: 1952 - protein, 293 aa, Homo sapiens
  MOD_RES (14)..(14): Variable amino acid
  MOD_RES (21)..(21): Variable amino acid
  MOD_RES (219)..(252): Variable amino acid
  MOD_RES (256)..(257): Variable amino acid
  MOD_RES (264)..(265): Variable amino acid
  MOD_RES (271)..(271): Variable amino acid
  MOD_RES (278)..(278): Variable amino acid
MNIPMSTAVFLSGXLIYCSDXSAEVCLTLLRDLAGFPPCLRLLPRIAGFILSLLLLLLFGPPPVVGSFSLRSPCRPPPGFAPSAPCLCSRVLFSALALRACSVLGARVPPSLFFFVAAPRSFLGPFLFFFCFGSLPGSSFFFFALCVLLFWALFGPLVCVFASFFPRGLAFSSRPCRVVVFSCLCLALAPVRFRVFCSARLVVFLLLGPVDDKTKKIKXXXXXXXXXXXXXXXXXXXXXXXXXXXXXXXXXXSPDXXQAASRLXXAFLSSXKPLFVMXLVITTLLPLACGTAK

SEQ ID NO: 1953 - DNA, 1258 bp, Homo sapiens
  source
  (1)..(1258)
  CDS (201)..(1058)
  modified_base (68)..(167): a, t, c, g, unknown or other
  modified_base (745)..(745): a, t, c, g, unknown or other
  modified_base (886)..(985): a, t, c, g, unknown or other
  modified_base (1013)..(1013): a, t, c, g, unknown or other
  modified_base (1032)..(1032): a, t, c, g, unknown or other
  modified_base (1037)..(1037): a, t, c, g, unknown or other
  modified_base (1067)..(1067): a, t, c, g, unknown or other
ggtatgtttgttttttttgttttttttttttgtttctttatgtttatcatatgaacaacatcacaacnnnnnnnnnnnnnnnnnnnnnnnnnnnnnnnnnnnnnnnnnnnnnnnnnnnnnnnnnnnnnnnnnnnnnnnnnnnnnnnnnnnnnnnnnnnnnnnnnnnnggactttgttgctagggtcaattcgttctaaggatggcttctgcttgttgttttgctgtgctattctgcattgctgtggatattctgcgttgtcgtgttgctgtgggtattctgtattgctgtgggtattctgtattgctgtggatattctgtattgttgttttgctgtggatattctgtattgctgtgggtattctgtattgctgtggatattctgtattgttgtggatattctgtattgttgttttgctgtgcatattctgcattgctgtggatattctgcattgtcgtattgctgtgggtattctgtattgctgtggatattctgtattgctgtgggtattctgtattgctgtggatattctgtattgctgtggatattctgtattgctgtggatattctgtattgttgttttgctgtggatattctgtattgctgtggatattctgtattgctgtggatattctgtattgttgtggatattctgtattgctgtgggtattctgtattgttgttttgctgtggatattctgtattgctgtgggtattctgtattgctgtggatattctgtattgntggggatattctgtattgttgttttgctgtggatattctgtattgctgtgggtattctggattggtggtttgctggggatattctgtattgctgtggatattctgtattgctggggatattctgtattgctcgcttgctgnnnnnnnnnnnnnnnnnnnnnnnnnnnnnnnnnnnnnnnnnnnnnnnnnnnnnnnnnnnnnnnnnnnnnnnnnnnnnnnnnnnnnnnnnnnnnnnnnnnnaagggttttttgggaggaacctttggtncgagggatcccattttgtnaaagnggagggcttcctcttttataaaatggtgcnttgtggtggacaggtttaaaagaagaccgtgggggtatagagaaaatagaggccattcttaaggaacttgaaaagccagcaccctgatgcgaccacgttttagtctacgtttatctgtctttacttaatgtcctttgttacaggccagaatgtttttctggcctgaatattctctctggggcgggtgttcc

SEQ ID NO: 1954 - protein, 285 aa, Homo sapiens
  MOD_RES (182)..(182): Variable amino acid
  MOD_RES (229)..(262): Variable amino acid
  MOD_RES (278)..(279): Variable amino acid
MASACCFAVLFCIAVDILRCRVAVGILYCCGYSVLLWIFCIVVLLWIFCIAVGILYCCGYSVLLWIFCIVVLLCIFCIAVDILHCRIAVGILYCCGYSVLLWVFCIAVDILYCCGYSVLLWIFCIVVLLWIFCIAVDILYCCGYSVLLWIFCIAVGILYCCFAVDILYCCGYSVLLWIFCIXGDILYCCFAVDILYCCGYSGLVVCWGYSVLLWIFCIAGDILYCSLAXXXXXXXXXXXXXXXXXXXXXXXXXXXXXXXXXXRVFWEEPLVRGIPFCXXGGLPLL

SEQ ID NO: 1955 - DNA, 1234 bp, Homo sapiens
  source
  (1)..(1234)
  CDS (201)..(1034)
  modified_base (142)..(142): a, t, c, g, unknown or other
  modified_base (152)..(152): a, t, c, g, unknown or other
  modified_base (156)..(156): a, t, c, g, unknown or other
  modified_base (166)..(166): a, t, c, g, unknown or other
  modified_base (176)..(176): a, t, c, g, unknown or other
  modified_base (179)..(180): a, t, c, g, unknown or other
  modified_base (186)..(186): a, t, c, g, unknown or other
  modified_base (209)..(308): a, t, c, g, unknown or other
  modified_base (382)..(382): a, t, c, g, unknown or other
  modified_base (504)..(504): a, t, c, g, unknown or other
  modified_base (733)..(734): a, t, c, g, unknown or other
  modified_base (759)..(759): a, t, c, g, unknown or other
  modified_base (819)..(819): a, t, c, g, unknown or other
  modified_base (854)..(854): a, t, c, g, unknown or other
  modified_base (860)..(860): a, t, c, g, unknown or other
  modified_base (875)..(876): a, t, c, g, unknown or other
  modified_base (900)..(901): a, t, c, g, unknown or other
  modified_base (903)..(903): a, t, c, g, unknown or other
  modified_base (915)..(915): a, t, c, g, unknown or other
  modified_base (918)..(918): a, t, c, g, unknown or other
  modified_base (920)..(920): a, t, c, g, unknown or other
  modified_base (969)..(969): a, t, c, g, unknown or other
  modified_base (1018)..(1018): a, t, c, g, unknown or other
  modified_base (1025)..(1025): a, t, c, g, unknown or other
  modified_base (1157)..(1158): a, t, c, g, unknown or other
  modified_base (1169)..(1169): a, t, c, g, unknown or other
  modified_base (1172)..(1172): a, t, c, g, unknown or other
  modified_base (1187)..(1187): a, t, c, g, unknown or other
  modified_base (1203)..(1203): a, t, c, g, unknown or other
  modified_base (1208)..(1208): a, t, c, g, unknown or other
  modified_base (1228)..(1228): a, t, c, g, unknown or other
  modified_base (1230)..(1230): a, t, c, g, unknown or other
gtgcttggcactggtgcagctgcagctgcccgtcatcaggcttcccctggtgaccacttttcccagtcccttttcaatccattagttgacttcacccagcaatactaaaagcattctcttggcgtgtggcttggttctccgnttaccttttncccngtttctcccnctgccccggntcnnacaaangtacccacagtcccatgttagcnnnnnnnnnnnnnnnnnnnnnnnnnnnnnnnnnnnnnnnnnnnnnnnnnnnnnnnnnnnnnnnnnnnnnnnnnnnnnnnnnnnnnnnnnnnnnnnnnnnncttgggtctgtcgtgcttcttctttgctggttcttctgctgtctttcttgtgctcctcttcgccgtgcgctctnttgtccctgttcgtgtttgggcctgtctggtcgttcctttgggtggggggcgccgccgcctttcgggtgcttccctgggttgttgtgggggggcgggttggttggttttttttccccctgcncgccgcctcgcgccccttcctgtggtggtcttccccccctttttttttttttttcgctcgggttgttgggggtggggttttgttgtggcctgcgggcccccgcctggcggttgccctggcccctgtgttggttctcttgccttcttcctttctttccttcctcccccggggtgtggtgccctcccccccctttttctttttttttggcctggcccgtggttttgtcccnnggttggcttttttttgtttcttccngttctgtttttgttgttttctccggctccggcttggggtgtgttgttgcttcccctttcngttccccccggttttctttggggcttgggtgtgtnttcggncctgcctcgttcccnnccctctgctctttcctccgtgtgnntngtggtgcttttnttngngcttttttccccgcctctctgggggttggctccgccctggtctttttgngctgccccccccccccctgtttttttttttttaggggtgttggcccccngtcttcntctacgtaagagaataccccataaaaagacagaaatttcagatattttttccttgaaaatgtgtgttgaacattttgaacctttaagacacggttagctgttttgtttttattactcatacgttagttttgnnctgtatctttnttnctgcacgcctacccngcccttaaaatgtttnttgtncctttttccttccaaacggntncccc

SEQ ID NO: 1956 - protein, 277 aa, Homo sapiens
  MOD_RES (4)..(36): Variable amino acid
  MOD_RES (61)..(61): Variable amino acid
  MOD_RES (102)..(102): Variable amino acid
  MOD_RES (178)..(178): Variable amino acid
  MOD_RES (187)..(187): Variable amino acid
  MOD_RES (207)..(207): Variable amino acid
  MOD_RES (226)..(226): Variable amino acid
  MOD_RES (234)..(235): Variable amino acid
  MOD_RES (239)..(240): Variable amino acid
  MOD_RES (257)..(257): Variable amino acid
  MOD_RES (273)..(273): Variable amino acid
MLAXXXXXXXXXXXXXXXXXXXXXXXXXXXXXXXXXLGSVVLLLCWFFCCLSCAPLRRALXCPCSCLGLSGRSFGWGAPPPFGCFPGLLWGGGLVGFFSPCXPPRAPSCGGLPPLFFFFSLGLLGVGFCCGLRAPAWRLPWPLCWFSCLLPFFPSSPGVWCPPPPFSFFLAWPVVLSXGWLFFVSSXSVFVVFSGSGLGCVVASPFXSPRFSLGLGCVFGPASFPXLCSFLRVXXGAFXXAFFPASLGVGSALVFLXCPPPPCFFFFRGVGPXSSST

SEQ ID NO: 1957 - DNA, 1039 bp, Homo sapiens
  source
  (1)..(1039)
  CDS (201)..(839)
  modified_base (820)..(829): a, t, c, g, unknown or other
tctagaggatccccttctttgacagaaacaaacagcacagcgtttcacactaatatatacataaacatttatcttgacataaaatcctgcacctacttttgtgagaaatgatatgtctatatccccatttggaatttaattgggctgggggaagggaggtttatattccctgctgaaggatttccagaagaatagacttgatggtgccgctctggatgggtgccgtgctcgaattcgtaatcatggtcatagctgtttcctgtgtgagattgttttccgctcacaattccacacaacatacgagccggatgcataatgtagtatgcctggggtgcctaatgaatgtgctatctcacattaattgtcgttcgctcactgcccgctttccagtcgggatgtctgtcgtgccagctgcattatatgaatcggccatcgcgcggggagaggcgtgtttgtgttttgtgcttcctgggggatatagttttaattctttggtttggtatcagaggtctatttatactaagactgtctcttttttgttgtcgtgtgtgattatcgttgttttacttttatttatatatatttatgttgtagtagagttagttatggtctttgtttttgttcttgttgttgagtatttgatatatgttttgtgtgtcgagtatgtttttgttttgtgtagtattattggtagtatgttagatgtgtattgttttattatattaagttgttatccatctagtggtgcttgtgcatgtttttatatgttgtatattgcttgtttcgttgttgattgtaattggtatcgtgttgatataannnnnnnnnnagtaaactaaaagacaacataaaaaaaaaaaaaaaaaaacaaaaaaaaaaaaaaaagtcttcaccagaaaaaaaaaaaaaaaaaaaaaaagataaaaaaaaaaaacaaaaaaaaaacaaaacaaacaacattattaggaatgtaatgttgcttttctctcccctgcttttccctgccttgtacatcgctctttgtctacaatatctctca

SEQ ID NO: 1958 - protein, 212 aa, Homo sapiens
  MOD_RES (207)..(210): Variable amino acid
MVPLWMGAVLEFVIMVIAVSCVRLFSAHNSTQHTSRMHNVVCLGCLMNVLSHINCRSLTARFPVGMSVVPAALYESAIARGEACLCFVLPGGYSFNSLVWYQRSIYTKTVSFLLSCVIIVVLLLFIYIYVVVELVMVFVFVLVVEYLIYVLCVEYVFVLCSIIGSMLDVYCFIILSCYPSSGACACFYMLYIACFVVDCNWYRVDIXXXXVN

SEQ ID NO: 1959 - DNA, 1279 bp, Homo sapiens
  source
  (1)..(1279)
  CDS (201)..(1079)
  modified_base (65)..(164): a, t, c, g, unknown or other
  modified_base (180)..(180): a, t, c, g, unknown or other
  modified_base (191)..(191): a, t, c, g, unknown or other
  modified_base (196)..(196): a, t, c, g, unknown or other
  modified_base (211)..(211): a, t, c, g, unknown or other
  modified_base (214)..(215): a, t, c, g, unknown or other
  modified_base (231)..(231): a, t, c, g, unknown or other
  modified_base (479)..(481): a, t, c, g, unknown or other
  modified_base (483)..(493): a, t, c, g, unknown or other
  modified_base (496)..(503): a, t, c, g, unknown or other
  modified_base (506)..(506): a, t, c, g, unknown or other
  modified_base (511)..(511): a, t, c, g, unknown or other
  modified_base (747)..(757): a, t, c, g, unknown or other
  modified_base (761)..(761): a, t, c, g, unknown or other
  modified_base (763)..(763): a, t, c, g, unknown or other
  modified_base (765)..(765): a, t, c, g, unknown or other
  modified_base (769)..(769): a, t, c, g, unknown or other
  modified_base (856)..(955): a, t, c, g, unknown or other
  modified_base (967)..(967): a, t, c, g, unknown or other
  modified_base (980)..(980): a, t, c, g, unknown or other
  modified_base (999)..(999): a, t, c, g, unknown or other
  modified_base (1014)..(1014): a, t, c, g, unknown or other
  modified_base (1049)..(1050): a, t, c, g, unknown or other
  modified_base (1056)..(1056): a, t, c, g, unknown or other
cgcccaccgcagggaggggccggcgttcccccctgggcccattagcatcgcacagaaacaaaacnnnnnnnnnnnnnnnnnnnnnnnnnnnnnnnnnnnnnnnnnnnnnnnnnnnnnnnnnnnnnnnnnnnnnnnnnnnnnnnnnnnnnnnnnnnnnnnnnnnnattttcttaggaaagngcctcgggttnttagntgcgatgccgtgggnggnnacccctccctcttcgnttttttatattacgataagtaccgttgactgcggccccgcgttgtgccacagatgccgggcctctgtcttttcttcattccgtgtgtttctgtcctttccggcctctgtcttttcttcgtcccgcgcatctttgtcctttctggcctctgtctttcctttcctttcctgtcctgtcctgtttgcgttctgcgcatcactgtcctttccagcctctgtcctgtctcccctccccctccctcccttcccnnncnnnnnnnnnnnctnnnnnnnnccnccccnctcccccccccttttctttttttttttttctctttttttttcctttcttttttttttcttcctctttccttttccttctttccttctttccttctttttctctttcttttcctcttccctcctttcctccctcttcccctctctttggtgttcttctttgtgccctttcttctttttttttctgtgtttccttctttttccttctcctttccccttttctccccctttctattttnnnnnnnnnnntttntntntatnttctcccgtcgcttggttttcgctttcggtgccgctccctgtgtttctcgcctccgctctttgtgtcgtaaaaaaaaaaaaaaaagnnnnnnnnnnnnnnnnnnnnnnnnnnnnnnnnnnnnnnnnnnnnnnnnnnnnnnnnnnnnnnnnnnnnnnnnnnnnnnnnnnnnnnnnnnnnnnnnnnnnaattgttttganaggtccctggttnttagccgcgctggggtggnggaaaaaacctctcncattaatagtggggggacttttttacacactactnncatggncatgtaggacagcatcgagctaaatgggaaaatcagcaaagaacatgggatttcaactggactttaggcctccacatacatttacattatagaatattctccccaacaactgcagaagatacgttcttttcatcagcacatgggacattctccaagacagaccatatattatgccacaaaacaagtattggccaggtgcagtggctcacacctgtaatcccag

SEQ ID NO: 1960 - protein, 292 aa, Homo sapiens
  MOD_RES (4)..(5): Variable amino acid
  MOD_RES (11)..(11): Variable amino acid
  MOD_RES (94)..(101): Variable amino acid
  MOD_RES (104)..(104): Variable amino acid
  MOD_RES (183)..(190): Variable amino acid
  MOD_RES (219)..(252): Variable amino acid
  MOD_RES (256)..(256): Variable amino acid
  MOD_RES (260)..(260): Variable amino acid
  MOD_RES (267)..(267): Variable amino acid
  MOD_RES (272)..(272): Variable amino acid
  MOD_RES (284)..(284): Variable amino acid
  MOD_RES (286)..(286): Variable amino acid
MPWXXTPPSSXFYITISTVDCGPALCHRCRASVFSSFRVFLSFPASVFSSSRASLSFLASVFPFLSCPVLFAFCASLSFPASVLSPLPLPPFPXXXXXXXXPPXSPPLFFFFFSLFFSFLFFFFLFPFPSFLLSFFFSFFSSSLLSSLFPSLWCSSLCPFFFFFLCFLLFPSPFPFSPPFYFXXXXXXXXSPVAWFSLSVPLPVFLASALCVVKKKKKXXXXXXXXXXXXXXXXXXXXXXXXXXXXXXXXXXIVLXGPWXLAALGWXKKPLXLIVGGLFYTLLXWXCRTASS

SEQ ID NO: 1961 - DNA, 1096 bp, Homo sapiens
  source
  (1)..(1096)
  CDS (201)..(896)
  modified_base (206)..(306): a, t, c, g, unknown or other
  modified_base (315)..(315): a, t, c, g, unknown or other
  modified_base (393)..(393): a, t, c, g, unknown or other
  modified_base (1043)..(1096): a, t, c, g, unknown or other
gagcaatcccagggaacatagacaggctgtacctagaaaccacagtggggcaagtttcaaaaagactcacccctacaatatctaggcaggcctacaaaatcttgcagatctttttggatgtttaaggattttgcggtttatttctgtagctaagcttgatgttccttcacgctggctaacgtctgccctctcctaggatcatgaannnnnnnnnnnnnnnnnnnnnnnnnnnnnnnnnnnnnnnnnnnnnnnnnnnnnnnnnnnnnnnnnnnnnnnnnnnnnnnnnnnnnnnnnnnnnnnnnnnnngttttttgnaaggtaccctgtttattatgcttcccttcgtgtggtggaaatatctttgctctctcccggttgggatttctgcagatnacatagcctctggagctgctgagctgtgttttcctgtgggagtgttgcgagtgttggatgtctgcatctgtgtgtggcattgggtgtgtgtgtgcacctgtcagtggagtgtgcttgaaattatgtggctaacccacttcagccctttgtctttctctttttttttttttttttttagtctcccaacctttctggtggaggatttccagtgttggatgtctgcatctttgtgtggcattgtgtgtgtgtgtgtgactataaatggagtctgcttaaaggaatattacttatgcacttcagtgctttctgtttttgagtcttccaacattttgggggcctgtgtttctctgcttgggatgtgggactttctccaggtagtgcttcctgcacaacaatgcagcctcagtagctgctgggctgtgtatttctgtgggagtattttgagtgtaagatgtctgagcgtgtgtgtggcattgtgtgttcaaaaaaagccactcttctaaaaagaagaagagcacaccctgcccaaaagaggtatctcctagtgtgtcattgtcatgaggcccacccacgcatatacactggcagtcctgtccactgggcactttgaattaatcttgaattcagttcccagctgagcaagtgattcnnnnnnnnnnnnnnnnnnnnnnnnnnnnnnnnnnnnnnnnnnnnnnnnnnnnnn

SEQ ID NO: 1962 - protein, 231 aa, Homo sapiens
  MOD_RES (2)..(36): Variable amino acid
  MOD_RES (39)..(39): Variable amino acid
  MOD_RES (65)..(65): Variable amino acid
MXXXXXXXXXXXXXXXXXXXXXXXXXXXXXXXXXXXFLXGTLFIMLPFVWWKYLCSLPVGISADXIASGAAELCFPVGVLRVLDVCICVWHWVCVCTCQWSVLEIMWLTHFSPLSFSFFFFFFSLPTFLVEDFQCWMSASLCGIVCVCVTINGVCLKEYYLCTSVLSVFESSNILGACVSLLGMWDFLQVVLPAQQCSLSSCWAVYFCGSILSVRCLSVCVALCVQKKPLF

SEQ ID NO: 1963 - DNA, 1285 bp, Homo sapiens
  source
  (1)..(1285)
  CDS (201)..(1085)
  modified_base (1)..(35): a, t, c, g, unknown or other
  modified_base (67)..(67): a, t, c, g, unknown or other
  modified_base (232)..(232): a, t, c, g, unknown or other
  modified_base (240)..(240): a, t, c, g, unknown or other
  modified_base (247)..(247): a, t, c, g, unknown or other
  modified_base (267)..(270): a, t, c, g, unknown or other
  modified_base (364)..(364): a, t, c, g, unknown or other
  modified_base (759)..(858): a, t, c, g, unknown or other
  modified_base (870)..(870): a, t, c, g, unknown or other
  modified_base (876)..(876): a, t, c, g, unknown or other
  modified_base (894)..(894): a, t, c, g, unknown or other
  modified_base (1200)..(1200): a, t, c, g, unknown or other
nnnnnnnnnnnnnnnnnnnnnnnnnnnnnnnnnnncgactgaggtatgattcatcgctccggggtgngaaacttcggagctcaagtggctcagcttaagggagaaggcacagttaacactgcaaagtccgcacagaagtctgcatttgtaatgtggagaacaatagaaattgacagcaccattccttgggtgggtgggggatggagacggggcacccgttggtggtgtgganaggaggangggggcntttttttttctgggcctccnnnntttggggggcgggccctgtctgtgtggtgtggctgtcttcccctctctcttgggtggttgttttcgttggttggtgctttgcgttttttctccnccccgtcttgtcttgtctcttgtcgcgcggcctcgtctctccttcccccccccccttcttttttcctctctcgtctgctctttcctttgctttcggtcttctcctttttggtggttttttttcctcgttcccctgcggcctttggtctctcctcccccggcccttttgctctcttgccttcccgctcttggtcctctcggcgcccttttcctctcggtctctgtggcccttgtgtcctcgtgccctttgttgctttttgtttttgcgctgggggtcgtcttccgcggctttgtctgtggcgttgcgggtggctgcttgttgtggtgggccttgtggcggtgttttgttttgtgtcgtttttgcgtcgctggtggagaaaaaaaaaaaaaaaaaannnnnnnnnnnnnnnnnnnnnnnnnnnnnnnnnnnnnnnnnnnnnnnnnnnnnnnnnnnnnnnnnnnnnnnnnnnnnnnnnnnnnnnnnnnnnnnnnnnngggcctcgattnttatcnctcgctggtggggtggantaagccttggcataaagctaattgtgtatttgtcttacttaaagctaattgtgtacttgtcttacttaaccagctatctgttgatgtgccttaacttcctagggcacatgtcatttgtttatatatttttactaagaaaatacatagttgggaaaagatggtcatctggtcaacccagaatacttgagtagagcattttgttagagccaggaagcctgggtttacatcccagctctgtcacttcctagctgtgtgatcttgggcaaatgacataacttctctgtgactcagtttttccatctgttnaatggggttaatattaacttcttaatatgatcgtgaggattaacgagatgaagacccttagcacagtggctacgacagagcgtgg

SEQ ID NO: 1964 - protein, 294 aa, Homo sapiens
  MOD_RES (11)..(11): Variable amino acid
  MOD_RES (14)..(14): Variable amino acid
  MOD_RES (16)..(16): Variable amino acid
  MOD_RES (23)..(24): Variable amino acid
  MOD_RES (55)..(55): Variable amino acid
  MOD_RES (187)..(220): Variable amino acid
  MOD_RES (224)..(224): Variable amino acid
  MOD_RES (226)..(226): Variable amino acid
  MOD_RES (232)..(232): Variable amino acid
METGHPLVVWXGGXGXFFFWASXXWGAGPVCVVWLSSPLSWVVVFVGWCFAFFLXPVLSCLLSRGLVSPSPPPFFFPLSSALSFAFGLLLFGGFFSSFPCGLWSLLPRPFCSLAFPLLVLSAPFSSRSLWPLCPRALCCFLFLRWGSSSAALSVALRVAACCGGPCGGVLFCVVFASLVEKKKKKKXXXXXXXXXXXXXXXXXXXXXXXXXXXXXXXXXXASIXIXRWWGGXSLGIKLIVYLSYLKLIVYLSYLTSYLLMCLNFLGHMSFVYIFLLRKYIVGKRWSSGQPRILE

SEQ ID NO: 1965 - DNA, 1159 bp, Homo sapiens
  source
  (1)..(1159)
  CDS (201)..(959)
  modified_base (1)..(95): a, t, c, g, unknown or other
  modified_base (99)..(99): a, t, c, g, unknown or other
  modified_base (105)..(108): a, t, c, g, unknown or other
  modified_base (120)..(120): a, t, c, g, unknown or other
  modified_base (122)..(122): a, t, c, g, unknown or other
  modified_base (124)..(124): a, t, c, g, unknown or other
  modified_base (134)..(134): a, t, c, g, unknown or other
  modified_base (139)..(139): a, t, c, g, unknown or other
  modified_base (145)..(146): a, t, c, g, unknown or other
  modified_base (151)..(151): a, t, c, g, unknown or other
  modified_base (374)..(374): a, t, c, g, unknown or other
  modified_base (399)..(399): a, t, c, g, unknown or other
  modified_base (620)..(620): a, t, c, g, unknown or other
  modified_base (844)..(943): a, t, c, g, unknown or other
  modified_base (953)..(953): a, t, c, g, unknown or other
nnnnnnnnnnnnnnnnnnnnnnnnnnnnnnnnnnnnnnnnnnnnnnnnnnnnnnnnnnnnnnnnnnnnnnnnnnnnnnnnnnnnnnnnnnnnnnngtcnctaaannnngggacttttgantncngaaagtacgngatgngttggnnggatntaatgcacatcggagtctcgccctgttgaccattgctggatgcatttgcatgaactgcgctcattgcaacctccgcctcccaagttcaagccattctcctgcctcagcctcccaagtagctgggactacaggtgagtgccaccatgcccagctaatttttgtatttttagtaaagatggagtttttttttgttggccagggtggtcttgaactcctgacctcnggtgatccaccctcggcctgccctnttgctgggattactggcttgacccctcacgcccggccttcttcccctggttgtttgacctgtgtctctgcttcttccttcccttgcttgttccttgtgcgcccctttcctttgcctcgtccgccgctttggctggtttttcttttgtgtcgctcccccgggttggcctttctttctggtcttctccgggtcttcttctccgtttcttcgttcgcggtttcnctcttttttcttctcttctttccctcctttgttcttccctcgcgggttttctttgcccttcgttcttttcgcttgtgcgttgctctcctgtttcccctgctctcctcccgctgccccgtcccgtttgcgcggtctttgttcgtgtgccttctttgctctccctcccctctcgtgctccgtcctgctcctcctgtctccccaccaaccaaaaacaaaaaaaaaannnnnnnnnnnnnnnnnnnnnnnnnnnnnnnnnnnnnnnnnnnnnnnnnnnnnnnnnnnnnnnnnnnnnnnnnnnnnnnnnnnnnnnnnnnnnnnnnnnncgacttgggntactgaacccatcgtcctgtggtggaaaaaacttgttctcagtcttgactccttcctgttaaagaaaaaaaaagttaatttgggaaatgtgatcaacgaacacgttttataaagcagcagcagccctagttgcttcaaaaatcaacaggtttctcatactgtatgctaaaacggcatactgctgttttcagctgctgaaatcaatg

SEQ ID NO: 1966 - protein, 252 aa, Homo sapiens
  MOD_RES (67)..(67): Variable amino acid
  MOD_RES (215)..(248): Variable amino acid
MNCAHCNLRLPSSSHSPASASQVAGTTGECHHAQLIFVFLVKMEFFFVGQGGLELLTSGDPPSACPXAGITGLTPHARPSSPGCLTCVSASSFPCLFLVRPFPLPRPPLWLVFLLCRSPGLAFLSGLLRVFFSVSSFAVSLFFLLFFPSFVLPSRVFFALRSFRLCVALLFPLLSSRCPVPFARSLFVCLLCSPSPLVLRPAPPVSPPTKNKKKXXXXXXXXXXXXXXXXXXXXXXXXXXXXXXXXXXDLGY

SEQ ID NO: 1967 - DNA, 5544 bp, Homo sapiens
  source
  (1)..(5544)
  CDS (201)..(253)
  CDS (3619)..(3892)
  CDS (4094)..(4567)
  CDS (5114)..(5344)
  modified_base (845)..(854): a, t, c, g, unknown or other
  modified_base (1379)..(1388): a, t, c, g, unknown or other
  modified_base (2216)..(2225): a, t, c, g, unknown or other
  modified_base (3103)..(3112): a, t, c, g, unknown or other
  modified_base (3637)..(3646): a, t, c, g, unknown or other
  modified_base (4543)..(4552): a, t, c, g, unknown or other
  modified_base (5097)..(5106): a, t, c, g, unknown or other
aaaaaaccaccccccccccccgccctgacgctgacgacatcgacactagaggaaagaaaaaaaagaaaaaagctctaggtgctatctgactcttgtcctcagctcttcccgtcgtactcccagcagtagggaaacacagtgatgcgacggttccatcgtcttgaaattccatgcatctataggtgatcgtgccacaatgaatgatcgtgattgttacgcataacgaggagtacctgacggcgtacaccgagtggtaaagttggtgacggcagaatgaatagggatagcaggtacgacttagctgatagtgcacaggggatggtcgttgttataaggtaatggaatcgagtttggcgcagtgtgaatcacatcagtgtgccataacagctagtcggattcagatcacctgatgcccgaggtacactagttcagtactaattggcgttcagagggcagccgggtgactagtgatccagagcttgacatagtaaccggggacgacatagggagcgtagtagactcgagagtctggcagcgcgttcgagctgagttcactagttgggctctgtctagcgagggatgtacacagactttgacggcagcggctctagataacagcgtgtcgaggagagtgaggtgagttatatcgtcctgtgggtggcgggtgggaggtgtggacggtcacaacgaacactgcgtggaagctgtcagctgcgggtagtcacggtgcttggtgatgcgagtgtctgtcattaacagagcagcaatctgtgcagagataggaggccgagcgagctgcgagagagtgtcgtgtggatagagtgtgaagtgagtgatgcgcgctnnnnnnnnnntatacttcttactcctcaagctcagagacaatttaaacagaatactcctctttctttgaattgtcattctgatcacaactggtttagtgacatggctgcaaagtaggtatacagttcttgaaaccctgtcttctttatcttcactttttcactgccaccttgttaagcactgtcattcataaagctttgttcagataattacgtttttaatgtaataacttgcaatattgactggagaagctagctaggtttcctgggttgagtaggggctcagaaagctgtgaaactcactgatttcctgcattaggaattgtttccatcctggatggatagtattgaagatatatgcttaaactattcctaacaccaggatttgtgcatgtgttttcttccccaagaaagctataaacaggaacaattttgctgtaagttttcctgtgtcctctctccctctctgccttccccctctcccaaaactaaagtaaaaggaatgttagctttccacttttctgtgaccagcagacnnnnnnnnnntgcctgcaggtcgactctagaggatccccttgaattgcagaaaatcctatggtcctcacccatagacacaccctcttaccactccgcctccgagacgtattagaatcaagatggggcttggtagcttagtaaagtatatgatccagtatctaccgatcggttatatatatggtaacaacaaaccattcagaggcaaaataaagaaaacaaatccagtcagtatgtcatcaagaataaatgagttagttctggataatgttgtaagaatagaactcctgggactgtgtgacgaagattactcagctcacggacctcaagactcgggaagttccagacgcctggcatctgtgtatggttagagtcagatgagggcttggggcgtgactcacaacgtaggagggtaactaagtggggttgggaatgtgacgagtgtcgctactcacggtattgcataattatgtgtgatgtgatgggggtatgaattgtcggagcagcgacgatagtggtgcagatgagcataatgattagaagggggagtgacactatcgataagatgcaggagcagcaggagctcaagagagagtcacagtagctgcgaacagcgagataagtaataagaggagtgagttgcagtcaggagtgactagtattagggagagataacggcagaccgtggaagctagagaggaataaggagtcagtaatcggtaaggatcgtagggagagccagtctagtagcacgcagtagtcagtggtggtagaagagctagcagatagtaggtgagcggtcaggcaatgagcgaggcaatagtgaggtgagtgaggaannnnnnnnnngagaagaaaaacgatcaccccacccccaggcccgactgaatgcggcaggacgacactagaggagcacacaggaaagaagaaaaaactattgaacacacgcctagtcacagcccagatagcataccccctccaacacttactagaagtaggatgcggcttcgtacggtttatagaatatagacgatatataaatatctgttagatatacagtagctacaaacggttgcattacggattacagcaatcatttcctgtcacgatagtcatcaaaagtacatgtacctggtctgtgtgatgttattatagatagaacccctgatactataacaatagactgagttagctacacgtgatcacaggctgatgagggcaacaagcgtggcatcgctctctgcttcggaacagatgaggactgtagtaatgcacacacagcatggcagcagacgtgacagtgaagtcggaatgctcgaagaggccacaacactggggactacgtgggtacgctaggatacagtatagcgttcgcatctcttggcaacaggaccgtggtcagaagtaacggagatattggtggtacggtgacgtgaaacacgtggcgcgatcatcgaaagtgtctggtactagtagagattaatgttcgccatctgaacacacacgaactgacggctgttatgagaacatgagatgcaataaagagacgaattgtgtagcaaacacaatagtgcgagcacaagcttacactaatgagagaacaagcacagtatcgacgataccaaacgaccaggctatcgcggccgagtcaggtaaggagtgggcgagcagcatgcaaacggtgacacatgatgtaagtgaggacaggagtagatagttacagcatnnnnnnnnnnattctgtttgtgctgagttatagttttgcagcctctataccaaattttgaaaccttatagtattttgcagtgataagtatgaaattgcttgattaataaatgcaagcaaaaatgtatgctggcaactcttaagacatttctaatcttactgtaccagtaagttttaaaaattaaagtcacacaaacagaatgttccacagtttttactttttcccttaaaaaaattaagtacttattttttaggccacttaattagagttcttttaatagacattgcacatataacacatatatagtcacacacacacactaacacacacacacacaaggaaaaacagaagaagacccagtagttataagatttttttttccttctaatttaccaattaggttattggacttattaaagaatagggctaggaaaacagtctctatgatctaataagcaagtataagtgaaagacaaagacagattttgagaggtacttattcacttctaattacaggggttccataaggaaaaannnnnnnnnntgttgtggcggtggcgtgtgccgtcctccttcttctcttttccgcccgccccctccccccccccccccccgcccccccctcccccccccccccggttacgaggacccccacccgccaagagagagagacattcagcgcaacccctcctctcctcgtccgctccacccccctgccctgtgtcgagagcttgcgccttcagtatccgcgcctcctatctctgttcttgcgccccggggtcatgtgttggtaggctgcctgtatggcgcttccggtgttcctttttctcctttcactggctcttcgggtggcgtcttttcgctctcgtggccgcggctgtgtgggttgtttgctgtatgttgtgtgctggtgtttgtgttttgtgtctggtgtgtgttggtcgtgtttgtgtgcttctgtcctttgtgctctgtcctcgtttcccgttagtgcctgccacgcgtcggtgttgtgtcccttacctggctgtcctgtgtgcccccctctcgtggtgttagttcactgttgttcctccgttctcttctgcagctggactgtgtttttacgcttcccgtgcgcgtcgtcttcttgtgttgtgggcctcagtggtgtcgcgctttggtttttgtctggttcgtgttcttgttgttgtgtgctgtcggtccttcctgtctgtggtgggtgtttagctgtcctccatggtcgtttgtgctcttttggctggtgtttgtcacttgtagcttggtgttctctgttgcgccgcgtggtcgtgtgttgttcttctgtgcttccgctgtgtgtctgtccgtcttcgcgtctgtccttttgcctgtggtactgtttcgcaggttggtatctggtgctgtggtcctttcagctatttcacttccgcttcgtgtnnnnnnnnnngattggatcatggaggtggtttccctcatgctgttggcatgatactaagtgagttttcacatctgatggttttatgagtctttggtagctcctcttgcatcattcttcttcctgccatcttgagaagaagaagaagactgcttcatcttctgccataatcttaaatttcctgaggcctcctcagtcatgctgaactgtgagtaaattaaacaactttcctttataaattacccagccttgggtatgtctttattagcagcctggaaatagactaatacaccatccttacataccattgacagttatagcatgatcacatatcagtgttttaatctaccctttatattgataagcacatacatttctatcaacaatatttaaaaaaaagacattaaacaaaataacccaggcctatgttttgcttacgtcagtatgagctccatagtaacctacaatgttgttatcctcactgactaacatcttttctgtcttctttcttgatatttctctgcatgacttccactcatctcactgcatttatttannnnnnnnnntatttagtgctggttggggaaggtggcggtcatttgctgcgtgccgttcctctcgttcgtcgccctcgcgccggccggccgtgcgccggcaccactgcggtgcgtgttccctcaccgcgctccccccccccctgagtttggtctagtgaggagcgcgcgcgcgcgacggcgggaggaggggagaggggatgttagatgctcccgccgcgtcggtgccttgctgcatctcgtgtactaacggcgtacgcgccctcagcgatccgtacgacgtcgacgcgcggttctagagcgtgatcccctaccttcgggtgtcatgatgctgccgcgttgtcgatgtgggacgacgcgtgtgctcgatgttggtgacggagtggtgcgtgcggcatgcgtgaggtgctcgttgttgatggtgacgtgttcgagaatgcatcgtggtct

SEQ ID NO: 1968 - protein, 343 aa, Homo sapiens
  MOD_RES (24)..(27): Variable amino acid
  MOD_RES (260)..(262): Variable amino acid
MIVIVTHNEEYLTAYTEWGSIRKXXXXCCGGGVCRPPSSLFRPPPPPPPPRPPLPPPPGYEDPHPPRERDIQRNPSSPRPLHPPALCRELAPSVSAPPISVLAPRGHVLCLPRVGVVSLTWLSCVPPSRGVSSLLFLRSLLQLDCVFTLPVRVVFLCCGPQWCRALVFVWFVFLLLCAVGPSCLWWVFSCPPWSFVLFWLVFVTCSLVFSVAPRGRVLFFCASAVCLSVFASVLLPVVLFRRLVSGAVVLSAISLPLRVXXXDWIMECWLGKVAVICCVPFLSFVALAPAGRAPAPLRCVFPHRAPPPPEFGLVRSARARRREEGRGDVRCSRRVGALLHLVY

SEQ ID NO: 1969 - DNA, 1763 bp, Homo sapiens
  source
  (1)..(1763)
  CDS (201)..(503)
  CDS (691)..(1563)
  modified_base (569)..(668): a, t, c, g, unknown or other
  modified_base (1025)..(1025): a, t, c, g, unknown or other
accgggctgcatccgatgcaagtgtgtcgctgtcgacggtgaccctatagtcgagggacctaataacttcgtatagcatacattatacgaagttatattaagggttccggatcaattctcatgtttgacagcttatcatcgataagctttaatgcggtagtttatcacagttaaattgctaacgcagtcaggcaccgtgtatgaaatctaacaatgcgctcatcgtcatcctcggcaccgtcaccctggatgctgtaggcataggcttggttatgccggtactgccgggcctcttgcgggatatcgtccattccgacagcatcgccagtcactatggcgtgctgctagcgctatatgcgttgatgcaatttctatgcgcacccgttctcggagcactgtccgaccgctttggccgccgcccagtcctgctcgcttcgctacttggagccactatcgactacgcgatcatggcgaccacacccgtcctaaggaaatacccactagtcaattcaccatcttgttgagaaataaaagacagtgccgatgagggtatcctaagagtggacaannnnnnnnnnnnnnnnnnnnnnnnnnnnnnnnnnnnnnnnnnnnnnnnnnnnnnnnnnnnnnnnnnnnnnnnnnnnnnnnnnnnnnnnnnnnnnnnnnnngtgctcgtttcgctgtccgtagtgcgttgtctgttctcgtttgcgtgttgtgttgcggttttcatctgcgtcttgttccgctgtgtctccgttttcggttcgtctccgtgtgcgttttggtttcggttcgcgtccgtttcctccgcgtgtggttcgcgatcggttcggtttcgtttctttgcgcttcattcgctctgtcgtgcttttgcgctgctgttcttatgcgttgcgattggtgtccgtgtcgtgttccgttcgtttcctgttcggtctggttcagtttccgttgcgttcttcttttgttccgttccgatcgcgttcgtgtcctctcctttccgtcccgtctgctctggttcngttcgtgtcatgtcggttcgtttgctgtctgtcgatcgcttcgggtcgggtccgttcttgcgtttcttgcttctcgttcgttcgttttgtccgtttgtttcgtttcatctcttggttcctccgtttccgttcctccgtctcttcgttcgttcgtctatctcttggtctttgtagttgtttggtcctgcgttccgttcgttcgttcgttcgttttttttcttcttctttgtttcgcgttattatcgttcgtcgtttgtgtggtctctgttcttcggtcggtgtttgttcgttgttccttcgtcgttctttgtgttttcgtgtgcgttcttctgtcttttttggtttgcgtccttccttgttgttcggtccttcgtgcgtcgttgttcttcgttgctttttcgtctttctgcctcgttcgttcttcgttctgtctttgtttccttcgtgttcgtttcttccttgctttttcgttcttcttgtccttggtcctcgttcttccgttcggtctgtcgttcttccttcgtttgtggtcggttgatcgttcgttgctttgtctgttcgtggttgtttctcttttcgttgcttctttcttggtccgttcgatcgttcggtcgttcggtcgcttctttcgtcggttgtgtcattgttgtgtttgttccgtcctgtcgttgcgttgtcctttgtgctctttctccgtggtgttgggtgctttctgcttttgtggttttttcgttttct

SEQ ID NO: 1970 - protein, 391 aa, Homo sapiens
  MOD_RES (213)..(213): Variable amino acid
MKSNNALIVILGTVTLDAVGIGLVMPVLPGLLRDIVHSDSIASHYGVLLALYALMQFLCAPVLGALSDRFGRRPVLLASLLGATIDYAIMATTPVLRKYPLCVVCSRLRVVLRFSSASCSAVSPFSVRLRVRFGFGSRPFPPRVVRDRFGFVSLRFIRSVVLLRCCSYALRLVSVSCSVRFLFGLVQFPLRSSFVPFRSRSCPLLSVPSALVXFVSCRFVCCLSIASGRVRSCVSCFSFVRFVRLFRFISWFLRFRSSVSSFVRLSLGLCSCLVLRSVRSFVRFFSSSLFRVIIVRRLCGLCSSVGVCSLFLRRSLCFRVRSSVFFGLRPSLLFGPSCVVVLRCFFVFLPRSFFVLSLFPSCSFLPCFFVLLVLGPRSSVRSVVLPSFVVG

SEQ ID NO: 1971 - DNA, 1546 bp, Homo sapiens
  source
  (1)..(1546)
  CDS (201)..(1346)
  modified_base (6)..(6): a, t, c, g, unknown or other
  modified_base (458)..(458): a, t, c, g, unknown or other
  modified_base (551)..(551): a, t, c, g, unknown or other
  modified_base (608)..(608): a, t, c, g, unknown or other
  modified_base (665)..(665): a, t, c, g, unknown or other
  modified_base (745)..(745): a, t, c, g, unknown or other
  modified_base (845)..(845): a, t, c, g, unknown or other
  modified_base (855)..(855): a, t, c, g, unknown or other
  modified_base (927)..(927): a, t, c, g, unknown or other
  modified_base (932)..(932): a, t, c, g, unknown or other
  modified_base (997)..(997): a, t, c, g, unknown or other
  modified_base (1002)..(1002): a, t, c, g, unknown or other
  modified_base (1033)..(1033): a, t, c, g, unknown or other
  modified_base (1090)..(1090): a, t, c, g, unknown or other
  modified_base (1100)..(1100): a, t, c, g, unknown or other
  modified_base (1110)..(1110): a, t, c, g, unknown or other
  modified_base (1112)..(1112): a, t, c, g, unknown or other
  modified_base (1122)..(1122): a, t, c, g, unknown or other
  modified_base (1148)..(1148): a, t, c, g, unknown or other
  modified_base (1150)..(1150): a, t, c, g, unknown or other
  modified_base (1160)..(1160): a, t, c, g, unknown or other
  modified_base (1177)..(1177): a, t, c, g, unknown or other
  modified_base (1180)..(1180): a, t, c, g, unknown or other
  modified_base (1182)..(1183): a, t, c, g, unknown or other
  modified_base (1185)..(1193): a, t, c, g, unknown or other
  modified_base (1196)..(1197): a, t, c, g, unknown or other
  modified_base (1199)..(1199): a, t, c, g, unknown or other
  modified_base (1206)..(1206): a, t, c, g, unknown or other
  modified_base (1208)..(1208): a, t, c, g, unknown or other
  modified_base (1212)..(1212): a, t, c, g, unknown or other
  modified_base (1216)..(1216): a, t, c, g, unknown or other
  modified_base (1221)..(1221): a, t, c, g, unknown or other
  modified_base (1244)..(1343): a, t, c, g, unknown or other
tttctntgcggtctctctttgcgtcgtgggtctccctctctcgtgtgtctctcgtcgcccgctcttgtgttccctttttgtctctcgccctgtcctgtttgttgtcgttgtgcggccgctctcctccggcttgccttcccgcctgtcgtccgtgttcggttccgctcttgccttgcccggttgttctcgtttttccggttttgtgccgtggggccgccttttctccgttcttccctctccgttttgtgtttggtgtgccgtccgtggtcttgttccgtgttcctcgcgtgttgtttctctccttggtccgtctgcgtgtgtttcctcccggtgttgtcttcgctttcccgtctggctcttctgttttcccgtcccgctcggtcttcgtgtgcttttccgtctcgcgcctgtccggttttgttcttcccctgcgcgcgtgtcgccgtggtttctcgcgnttccgtgggtcctcgtcctcctccttcctgtgtgttctgttcgtccccgttcgcgttctcggtgcgggccgccgcgcccgtgtttgcgtcccnttttcccgccgctctttttctcctcgttctcgtgcgcgttcccctccctcgtgttcnttgttgtgcgcgggtgtgtgtccccgtctccgcgctgtctccttttctcgctcttgntttccgcgtgggtccgttcgtgtcgtggctctgtgcggtgcccgcctcgccgctccctcgttcgttctcggtgctcttcngcccgctggtgtcctcctttggctctgcttggttgcgtgtgcgcgtcctccgctctcgccggcttgtgtgtctgcgcccttgcgtgcctcttcgtgcgcntgcgttttcntgtgcgctcgcgtgcgtgcgttcgtgttgccgcgtctcgtgtccgtgcgcgcgtcgcgcgcctgtctcgctngtgtncgcgtcgtcgtgcgtgtcgcttcgcgtttcgggcttgcgtctggctccgttcctctcgccgttgntgtgntgtgtgtgtgggcgcggggcgcgtcgggctnttctcttcgtgtctttctttctcccccgcgcctcgtctgtttgtgtcctgtcctcgnggccgcgggngtggccgtcntntatcttcctntattttggcgttgcgtcgcgtcgcgntntcgtgtgtgncgcccagtatttgtcgnttncnntnnnnnnnnntcnntngggggcntntgtntggncttcngtgctgtatttagccgggggagnnnnnnnnnnnnnnnnnnnnnnnnnnnnnnnnnnnnnnnnnnnnnnnnnnnnnnnnnnnnnnnnnnnnnnnnnnnnnnnnnnnnnnnnnnnnnnnnnnnntaggtcatccaggaggtctagtcccacaaaacatgttataaccagcaggtggttggttcccagtgtaccaaccggtgggccaagcctttccggcgccaagaaaataaagtgggactttgtttccggtggtgcaatcatccaaggtcaacagggaaggccgctccccctttatgaaaattgccgctgtgcatgtgatcaacagg

SEQ ID NO: 1972 - protein, 381 aa, Homo sapiens
  MOD_RES (155)..(155): Variable amino acid
  MOD_RES (182)..(182): Variable amino acid
  MOD_RES (219)..(219): Variable amino acid
  MOD_RES (243)..(243): Variable amino acid
  MOD_RES (266)..(266): Variable amino acid
  MOD_RES (268)..(268): Variable amino acid
  MOD_RES (278)..(278): Variable amino acid
  MOD_RES (297)..(297): Variable amino acid
  MOD_RES (304)..(304): Variable amino acid
  MOD_RES (308)..(308): Variable amino acid
  MOD_RES (317)..(317): Variable amino acid
  MOD_RES (320)..(320): Variable amino acid
  MOD_RES (326)..(331): Variable amino acid
  MOD_RES (333)..(333): Variable amino acid
  MOD_RES (336)..(336): Variable amino acid
  MOD_RES (338)..(339): Variable amino acid
  MOD_RES (341)..(341): Variable amino acid
  MOD_RES (348)..(381): Variable amino acid
LCRGAAFSPFFPLRFVFGVPSVVLFRVPRVLFLSLVRLRVFPPGVVFAFPSGSSVFPSRSVFVCFSVSRLSGFVLPLRACRRGFSRFRGSSSSSFLCVLFVPVRVLGAGRRARVCVPFSRRSFSPRSRARSPPSCSLLCAGVCPRLRAVSFSRSXFPRGSVRVVALCGARLAAPSFVLGALXPAGVLLWLCLVACARPPLSPACVSAPLRASSCACVFXCARVRAFVLPRLVSVRASRACLAXVRVVVRVASRFGLASGSVPLAVXVXCVWARGASGXSLRVFLSPPRLVCLCPVLXAAGVAVXYLPXFWRCVASRXRVXRPVFVXXXXXXSXGGXCXXFXAVFSRGXXXXXXXXXXXXXXXXXXXXXXXXXXXXXXXXXX

SEQ ID NO: 1973 - DNA, 1204 bp, Homo sapiens
  source
  (1)..(1204)
  CDS (201)..(1004)
acatgttttcaatgtgttttttctatttagatatgtttaaatacacaaacatatacattgtcttacaattgcctgcagtattcagtgcagtaacctgccattggctgtatcatataccctagatgtgtagcaggagccattggctgtatcatataccctagatgtgtagtaggagccattggctatatcatataccctagatgtgtagcaggaccattggctgtatcatataccctagatgtgtagtaggacgcattggctatatcatataccctagatgtgtagtagggaccattggctatatcatataccctagatgtgtagtaggacgcattggctatatcatataccctaggtgtgtagcaggacgcattggctatatcatataccctagatgtgtagcaggagccattggctatatcatataccctagatgtgtagcaggagccattggctatatcatataccctagatgtgtagcaggagccattggctgtatcatataccttagatgtgtagcaggagccattggctgtatcatataccctagatgtgtagtaggagccattggctataccatatactctagatgtgtagtaggagccattggctatatcatataccctaggtgtgtagtaggagccattggctatatcatataccctagatgtgtagtaggagccattggctatatcatataccctaggtgtgtagtaggagcaattggctacatcgtataccctagatgtgtagcaggagcaattggctatatcatataccttagatgtgtagcaggagccattggcagtatcatataccctagatgtgtagtaggagccattggctatatcatataccctaggtgtgtagtaggagcaattggctatatcatataccctaggtatgtagtaggagccattggctgtatcatataccctaggtgtgtagtaggagccattggctatatcatataccctaagtgtgtagtaggctataccatgtaggtttgtgtaagtgcattctaggatgttcacacaaagacaaaatcaactaacaacacatttttcagaacacatccctgtcactaagtgacacaagactctatttgtttcctcctttatacaattattctttataacccttactgcaatgtattttaaggagagtaaagattttcttttccaattcattatgtatttcttat

SEQ ID NO: 1974 - protein, 267 aa, Homo sapiens
MCSRTIGCIIYPRCVVGRIGYIIYPRCVVGTIGYIIYPRCVVGRIGYIIYPRCVAGRIGYIIYPRCVAGAIGYIIYPRCVAGAIGYIIYPRCVAGAIGCIIYLRCVAGAIGCIIYPRCVVGAIGYTIYSRCVVGAIGYIIYPRCVVGAIGYIIYPRCVVGAIGYIIYPRCVVGAIGYIVYPRCVAGAIGYIIYLRCVAGAIGSIIYPRCVVGAIGYIIYPRCVVGAIGYIIYPRYVVGAIGCIIYPRCVVGAIGYIIYPKCVVGYTM

SEQ ID NO: 1975 - DNA, 2176 bp, Homo sapiens
  source
  (1)..(2176)
  CDS (201)..(1976)
  modified_base (207)..(306): a, t, c, g, unknown or other
  modified_base (1632)..(1731): a, t, c, g, unknown or other
gaatggagaattgattggaatggaatggaacagagaatgcagaatggaatggaatggaatggagaatggagtagatagatggagattgactgtatgagagtgacaaaatgagatgatgatgagatgtatgatgatgagatgtatgatgatgagatgtatgtatgaggcatgaatgagaatggaagggaagggaatggagaatggcannnnnnnnnnnnnnnnnnnnnnnnnnnnnnnnnnnnnnnnnnnnnnnnnnnnnnnnnnnnnnnnnnnnnnnnnnnnnnnnnnnnnnnnnnnnnnnnnnnnccgggcagtgcgaggcagtggcgcatggaagggcgtggggcagggggggggggggaggggcgggcggtgagtggcggggcgacgatgggaggagtgccagggcggagcgattgccagtcagcgaatgggcagtgcaggagatgcgcatggcatgcacgtgtcgatgcgggggtagcgatgtggtggggagttggcgatgtggggccgagtgcgggtggcatttgtgcgcagttgcgcagttgttgctgaggtgccaggtggcaggtgccgagtttggggcccatgtggccattgccattggtgcgattccagtgctgccattttcattccactgctgcggtgtgccagttgccagtggtgcgtccatttgccaagtccattccatttctcccataacgcatgcctcccagttcgcattgccatttgtggccgctgcatgtggtattgcaccattggcagtgtgcattcgcattggtggcggtgttgccagtgcattgtcgcattgccattggtgcgtccgcatgtttcgcatttcccattctgccctgtccattgccatgtgcccattgccattctcaattcccattccattctccttaccaacctccattccattcctttgccatcctgccattccatttcattccactatccattccattccatcctccattccattccattcttttccattttcaagtcctttccattctcccttccattctattgtccattccattctccacaccattccattctccttaccaacctccattccattacattccattctccattccattatattcactactgcattcaattccatattctattcctttctccattccattctccattccattccattctccataccatcctccattccattacactgcattccattctccattctattttattcaccacggcattccattacattttccattccattctattctccattccattccatattctattcctttctccattccattcccctttccattccattctccattccattccattttctattccactccattcaccactgcattccattccagtctccattccattccattctccattgcatttcattctccactgcattcctttccattccatttcccactgaattccattctccattccattcccttctattctccatttcatttcactctcccttccagttcaatctccattcccttccattctccattccactccacattcccttccattctccattccattctattgtctattccattccatttcaattcattgttcactccattcccttccccnnnnnnnnnnnnnnnnnnnnnnnnnnnnnnnnnnnnnnnnnnnnnnnnnnnnnnnnnnnnnnnnnnnnnnnnnnnnnnnnnnnnnnnnnnnnnnnnnnnnaagaagaaagagacagaagcacagcacaaccagagagacagaaaaagagagggagacagagagaggaggagaggggcgaggggagaagagagggtagcggcaagagtgacgagagtacggcaggagcgacagatagaccaggaaaagaaagagggagcgcaagtgacaagagagatgccgggccggcagaaacggatggaagagggctccagagcgagagcagaggaagaaaacaaataagatagagatgccgtccagcacaaaagataaaacagataaaaagaagacatcaatcgtgagagagaggagcgtgatcttagaaaaagactgtaattttcagagacttgatgataggagagtaaaaggatggcaggccactcagaggcaaaaaataggctgagtgctgacaaaagttgaataggcacccggccattaaccacttatt

SEQ ID NO: 1976 - protein, 591 aa, Homo sapiens
  MOD_RES (3)..(36): Variable amino acid
  MOD_RES (478)..(511): Variable amino acid
MAXXXXXXXXXXXXXXXXXXXXXXXXXXXXXXXXXXGQCEAVAHGRAWGRGGGGGAGGEWRGDDGRSARAERLPVSEWAVQEMRMACTCRCGGSDVVGSWRCGAECGWHLCAVAQLLLRCQVAGAEFGAHVAIAIGAIPVLPFSFHCCGVPVASGASICQVHSISPITHASQFALPFVAAACGIAPLAVCIRIGGGVASALSHCHWCVRMFRISHSALSIAMCPLPFSIPIPFSLPTSIPFLCHPAIPFHSTIHSIPSSIPFHSFPFSSPFHSPFHSIVHSILHTIPFSLPTSIPLHSILHSIIFTTAFNSIFYSFLHSILHSIPFSIPSSIPLHCIPFSILFYSPRHSITFSIPFYSPFHSIFYSFLHSIPLSIPFSIPFHFLFHSIHHCIPFQSPFHSILHCISFSTAFLSIPFPTEFHSPFHSLLFSISFHSPFQFNLHSLPFSIPLHIPFHSPFHSIVYSIPFQFIVHSIPFPXXXXXXXXXXXXXXXXXXXXXXXXXXXXXXXXXXEERDRSTAQPERQKKRGRQREEERGEGRREGSGKSDESTAGATDRPGKERGSASDKRDAGPAETDGRGLQSESRGRKQIR

SEQ ID NO: 1977 - DNA, 1327 bp, Homo sapiens
  source
  (1)..(1327)
  CDS (201)..(1127)
ccatggcctcccctccctccagctcacccagccccagtgtgcatcacatttcctgatgctttcaaccttggatcagcccagccatccttcttctctgttcctacagctggggctgttgagtgaggtttgggaagaagctttcttgtgtgcacggactctcgtcatttctcccggtttccagcaccctggaatcctcttctatgtcctttctcagctcccactcatttccacactggtggaggcagacctcgggtgtgatcctcacggcctccctgctctgctcttccttggtaggtgggtgtcccggcaggcggctttacttcctgctctgctcttccttggtaggtgggtgtcccggcaggcggctttacttcctgctgcacagagtcaagggtgtgagtgtggccgcctcagcttggccctcccttgtttattccactcccctttgctttttcttctcacgtgtcagaggcacgtatggcctggatgtgtgtgtgtggtgtgggtgtgtatatgtggcggggcgtggggaaatgaggatgtatttgggtgtggtgtatgtgtatgtgggtattttttggggtgtatggtgtgtatgcgtttgtgtggggcatgtttatggtgtgagtgtgagggaatgtgtgtggtgtgtgtgtatatatgttgggggaggtgggtgtcatgtgatgtgtgtgactgtggtgtgtttgtatatgtgggactatgagggattgggatgtgtgtattttgtgtgtgggtggagatgtgggtgtggtatgcatggtgtgtgtggctatgtgagggggatgtgtgtgtgtggtatgtgtatgttgggggatgtttgtggtgtgtatgtacatgtggagggtatggggtatgtgtgtttgtgggaggtgcgtggggggatatgtgtgggtgtgtgtgtgggtgtggcgtgtgggggtgtgtgggctgcatatgtgggggtgtgtgtatgtgtgtgtgttggagtgtgtgtgtggtgtggggaatgtgtggtgtgtgtgtggtgtgtgtgtcggggggtgggtgatgtgtgtttgtgggctctttcagccaaggctggggcagttagtgcagtcagctggtgtgttgtgtgtggggtgtgatgtgtgtgtgatctgtggtgtgtgatgtgggtgcgtggtgtgtggtgtgtgtctggtatgtgtgtggtgtgggtgtgtgggctctgtcagccaaggctggggcaattagtgcagtcagctggtgtgtgtgtggtgtgtctgatgtgtgtgtggtatctgtgtggtgtgtgtgtgatgtgtgtgatgtatgtgtgttgtgt

SEQ ID NO: 1978 - protein, 308 aa, Homo sapiens
MSFLSSHSFPHWWRQTSGVILTASLLCSSLVGGCPGRRLYFLLCSSLVGGCPGRRLYFLLHRVKGVSVAASAWPSLVYSTPLCFFFSRVRGTYGLDVCVWCGCVYVAGRGEMRMYLGVVYVYVGIFWGVWCVCVCVGHVYGVSVRECVWCVCIYVGGGGCHVMCVTVVCLYMWDYEGLGCVYFVCGWRCGCGMHGVCGYVRGMCVCGMCMLGDVCGVYVHVEGMGYVCLWEVRGGICVGVCVGVACGGVWAAYVGVCVCVCVGVCVWCGECVVCVWCVCRGVGDVCLWALSAKAGAVSAVSWCVVCGV

SEQ ID NO: 1979 - DNA, 2416 bp, Homo sapiens
  source
  (1)..(2416)
  CDS (201)..(2216)
  modified_base (330)..(1246): a, t, c, g, unknown or other
  modified_base (1704)..(1704): a, t, c, g, unknown or other
  modified_base (1712)..(1712): a, t, c, g, unknown or other
  modified_base (1716)..(1717): a, t, c, g, unknown or other
  modified_base (1724)..(1724): a, t, c, g, unknown or other
  modified_base (1803)..(1803): a, t, c, g, unknown or other
  modified_base (1814)..(1814): a, t, c, g, unknown or other
  modified_base (1836)..(1836): a, t, c, g, unknown or other
  modified_base (1838)..(1838): a, t, c, g, unknown or other
  modified_base (1840)..(1840): a, t, c, g, unknown or other
  modified_base (1842)..(1843): a, t, c, g, unknown or other
  modified_base (1847)..(1851): a, t, c, g, unknown or other
  modified_base (1855)..(1855): a, t, c, g, unknown or other
  modified_base (1859)..(1864): a, t, c, g, unknown or other
  modified_base (1869)..(1870): a, t, c, g, unknown or other
  modified_base (1873)..(1873): a, t, c, g, unknown or other
gtgaaaaaatattttaaatcctcttttttattttagagtgatctttgaagatgattaccttattttacaaacagacgtttctaataattgaataccattaaatatctgtccaaaaatttccttttgacctcaaaattacaactaatatatagtgtttttgtttcttcctaacgacaaggaaatctgatgtcattgtgtaaatgatgcagaagaaatgttttgcatgggcaaaagtgcactatctcaaggatttggataaacttttatgtcattgtccttgtctgtggcacagtgtggggcgggggagggggtcctctgctctgatccacnnnnnnnnnnnnnnnnnnnnnnnnnnnnnnnnnnnnnnnnnnnnnnnnnnnnnnnnnnnnnnnnnnnnnnnnnnnnnnnnnnnnnnnnnnnnnnnnnnnnnnnnnnnnnnnnnnnnnnnnnnnnnnnnnnnnnnnnnnnnnnnnnnnnnnnnnnnnnnnnnnnnnnnnnnnnnnnnnnnnnnnnnnnnnnnnnnnnnnnnnnnnnnnnnnnnnnnnnnnnnnnnnnnnnnnnnnnnnnnnnnnnnnnnnnnnnnnnnnnnnnnnnnnnnnnnnnnnnnnnnnnnnnnnnnnnnnnnnnnnnnnnnnnnnnnnnnnnnnnnnnnnnnnnnnnnnnnnnnnnnnnnnnnnnnnnnnnnnnnnnnnnnnnnnnnnnnnnnnnnnnnnnnnnnnnnnnnnnnnnnnnnnnnnnnnnnnnnnnnnnnnnnnnnnnnnnnnnnnnnnnnnnnnnnnnnnnnnnnnnnnnnnnnnnnnnnnnnnnnnnnnnnnnnnnnnnnnnnnnnnnnnnnnnnnnnnnnnnnnnnnnnnnnnnnnnnnnnnnnnnnnnnnnnnnnnnnnnnnnnnnnnnnnnnnnnnnnnnnnnnnnnnnnnnnnnnnnnnnnnnnnnnnnnnnnnnnnnnnnnnnnnnnnnnnnnnnnnnnnnnnnnnnnnnnnnnnnnnnnnnnnnnnnnnnnnnnnnnnnnnnnnnnnnnnnnnnnnnnnnnnnnnnnnnnnnnnnnnnnnnnnnnnnnnnnnnnnnnnnnnnnnnnnnnnnnnnnnnnnnnnnnnnnnnnnnnnnnnnnnnnnnnnnnnnnnnnnnnnnnnnnnnnnnnnnnnnnnnnnnnnnnnnnnnnnnnnnnnnnnnnnnnnnnnnnnnnnnnnnnnnnnnnnnnnnnnnnnnnnnnnnnnnnnnnnnnnnnnnnnnnnnnnnnnnnnnnnnntcctgtgctgtccctcccctgcttcctctctctccctgctctggctctctcccctcggtcctctttcccctcttccttccctctctccctcctttcgctccttcgtctctttgctcgcttcggttcctttttcttctttccctcctctgtttctcttctgttcctccttttcgccgcttcctgtctgcgttgcctgccctcttccttctgctctctccttgccgtctccgttcctctgggtctccgccctctctcctcttctctttcctctctttttcgcctgtcctccctttctctcctttctttccctcctccttctcttcttgccttccccggttcctttcgctctctgttcctccttttctctccttctgttctttctcttcttccccctggggttcctgcctgttttcctttccttctccgcccttttctccttttgtgccctctttgttccncttgtgcncggnntggtagngtgcttggtttagggtgccttccttcccgtcgttccttccttgtccttggcttgctttcggtttgttgtgtgttttttntttggtttttntgtttgtttttttggttttttntntntnngttnnnnntggnatgnnnnnntgggnntgnaaaatggtgtggcggaactggacagacccctactccaccccacagggatgagcccatccttggaggagcccagccctggaagtgccagtcactcctgagagtaaatcaagatgcaggacctcttactgcccatgacccaggtctcctttcaaacctaccaatcaggatgctagaagtgcatgatgggcagagcaagccaggggttatgctaatgagctccctcccctggatgggatcctgtgggtttccttcttcccatgggcacccccaacctggcctggccaacagacactgcaaacaagcgcccttacctgcagcagctcaggaaaactcctctatttgaaagctgagctctgtctgtattagactaagtttatggaatggaaaagggtagatggtcatttcagagtgactttggggggaaaaaactcaggatattgtaattaaagttggttataccaagaaagtcaaaagttctggccttcattacccttaagtgatgacgcttgtgtgaattgcatcccccccacctcaaaattcatg

SEQ ID NO: 1980 - protein, 671 aa, Homo sapiens
  MOD_RES (44)..(349): Variable amino acid
  MOD_RES (502)..(502): Variable amino acid
  MOD_RES (506)..(506): Variable amino acid
  MOD_RES (508)..(508): Variable amino acid
  MOD_RES (535)..(535): Variable amino acid
  MOD_RES (538)..(538): Variable amino acid
  MOD_RES (546)..(555): Variable amino acid
  MOD_RES (557)..(558): Variable amino acid
MMQKKCFAWAKVHYLKDLDKLLCHCPCLWHSVGRGRGSSALIHXXXXXXXXXXXXXXXXXXXXXXXXXXXXXXXXXXXXXXXXXXXXXXXXXXXXXXXXXXXXXXXXXXXXXXXXXXXXXXXXXXXXXXXXXXXXXXXXXXXXXXXXXXXXXXXXXXXXXXXXXXXXXXXXXXXXXXXXXXXXXXXXXXXXXXXXXXXXXXXXXXXXXXXXXXXXXXXXXXXXXXXXXXXXXXXXXXXXXXXXXXXXXXXXXXXXXXXXXXXXXXXXXXXXXXXXXXXXXXXXXXXXXXXXXXXXXXXXXXXXXXXXXXXXXXXXXXXXXXXXXXXXXXXXXXXXXXXXXXXXXXXXXXPVLSLPCFLSLPALALSPRSSFPSSFPLSLLSLLRLFARFGSFFFFPSSVSLLFLLFAASCLRCLPSSFCSLLAVSVPLGLRPLSSSLSSLFRLSSLSLLSFPPPSLLAFPGSFRSLFLLFSPSVLSLLPPGVPACFPFLLRPFLLLCPLCSXCARXGXVLGLGCLPSRRSFLVLGLLSVCCVFFXWFXCLFFWFFXXXXXXXXXXGXXKWCGGTGQTPTPPHRDEPILGGAQPWKCQSLLRVNQDAGPLTAHDPGLLSNLPIRMLEVHDGQSKPGVMLMSSLPWMGSCGFPSSHGHPQPGLANRHCKQAPLPAAAQENSSI

SEQ ID NO: 1981 - DNA, 1426 bp, Homo sapiens
  source
  (1)..(1426)
  CDS (201)..(1226)
  modified_base (363)..(462): a, t, c, g, unknown or other
actgagcctgcacatctcaccctgaattcaaaatcaaaagatggggtgagggttctcggcaaaacgcagcctgagattctattttggagacccctgttccagagagaagagcagtgctcctgacacttggtgggtggggcccagggacgctgctcaacaccctgcagtgcacaggacgcccccacagtcattcaacttaaatgttattagtgataaagttgagaaagactctatctattgtctatctatgtatccatctatccacccattcatctatcatcatttatctattacctatgtatcatttatctattatgtctatacatctagccatccatcatccatcatcattatttattatcnnnnnnnnnnnnnnnnnnnnnnnnnnnnnnnnnnnnnnnnnnnnnnnnnnnnnnnnnnnnnnnnnnnnnnnnnnnnnnnnnnnnnnnnnnnnnnnnnnnnttctcttttcttcttatgtactctttcttttttctctcttctttccttccttcctttctttccatccctccctccttctttccttttcccctctccatcccttcctcctttccttccttcctttctttttttcctctctattctttgtctctcttcatccatctctccttttcttacatgcctcttttcttccttccttctttcttctctccctccttcccttctttccttccttccttcccttcctccttccctctcacattcccttcctccctccctccctcattgccttcctccctgcttcacttcttcctccctcccttcctccatacctccctgcttccttttttccaacctccttccctcctcgttccttccctctctttctgcctccctcccttccttcctcccatcccttcttcctgcttccctcctgctctccctgttccctgcctccctccctgccttcctctgtctctcccttcctccactccttaattttggtttccacttcccactctcacactttgagcctctatcccattacttccttgctcagagcagctctttctaacacctccctgctgctgggagccccagcgcacagcaaaagcagacccagcaccagtttactttttgtattattattttttatctttttcaaccttccatttcagatggctgaagacctaggggtgagcagagaacccagcccaggcctgcggagcgtcctgaccgtaatcgttttatctgctaagacatagccttaaagcaaacccttccatctgccgctcccctcgccctgctggcaaattcccaccacgatgggattctcaatcacatggcggattctctgccttcagttccatatgcttttgcctttctggatgcacagaagctcattatagcaaatcatatttctgcataagagcttcagaaaatgaagagaaatgcagatattttc

SEQ ID NO: 1982 - protein, 341 aa, Homo sapiens
  MOD_RES (55)..(88): Variable amino acid
MLLVIKLRKTLSIVYLCIHLSTHSSIIIYLLPMYHLSIMSIHLAIHHPSSLFIIXXXXXXXXXXXXXXXXXXXXXXXXXXXXXXXXXXLFSSYVLFLFSLFFPSFLSFHPSLLLSFSPLHPFLLSFLPFFFSSLFFVSLHPSLLFLHASFLPSFFLLSLLPFFPSFLPFLLPSHIPFLPPSLIAFLPASLLPPSLPPYLPASFFPTSFPPRSFPLFLPPSLPSSHPFFLLPSCSPCSLPPSLPSSVSPFLHSLILVSTSHSHTLSLYPITSLLRAALSNTSLLLGAPAHSKSRPSTSLLFVLLFFIFFNLPFQMAEDLGVSREPSPGLRSVLTVIVLSAKT

SEQ ID NO: 1983 - DNA, 1336 bp, Homo sapiens
  source
  (1)..(1336)
  CDS (201)..(1136)
  modified_base (235)..(334): a, t, c, g, unknown or other
  modified_base (1270)..(1270): a, t, c, g, unknown or other
gacgaatacgtaggagcgatcgtggtgtggtgcgtaattgagtgtcttctttgcatagaaagaagcacatactactatctcacgtcataaggactagtataaatgtaggagagcctatttagtaatacctcctactttgatcgtagtcatcgtcttgttcctttgaccccttattaataaagcttctcccctataggtatatggagcatagccacgttattctggaatacgagtnnnnnnnnnnnnnnnnnnnnnnnnnnnnnnnnnnnnnnnnnnnnnnnnnnnnnnnnnnnnnnnnnnnnnnnnnnnnnnnnnnnnnnnnnnnnnnnnnnnntggttttcctttctcggttgtttggtgtttttttgtcgttggtttgtgctctcgtccgtcggtttgtctgttctgtatcgttcttgtcggttgtgtattttcctggttctgtttgtttggttggttcttcttctgttttgctgtcggtttcgtttgttgttgtttttcgtcgcttcgttttcgtttgttgttgtttgtgctatctggtctcgtattcgcgtgtcttctcgtctttatcgttgcgtgtcctttcgtgttcgtctgtttttgtctttttgtccctgcttctatttcctcttctttgtttgcagttgggcttctgttgttgcctggtgtgttgcttctagtgtgctcttcgtctttcttccggttctctgttttcgcttctcccgacttgcatcctcttttgttttttgtggttccttcttcttttggtctcccctgcttccttcggttttttggacctttctttttgttgctttccttttatgttgtcttgctcttgtttgtcgtgctctcttttctctcttctcctctcccggctggttctcgtgtgcgttatcttgtcgcctgggctttttttgttttgttttttgttgttttttattgttgtgtcgttttggcttttttttcgttttgttttgtttggttgttcttttgtggtggttttctgtgtttttttttttggttcttctttttttgttttttggcttttggtgtcggtcttgtttttcgttttggtggctcgggctcgtttattttcatgctgttctcgtctcctttttcatctgtgtctctgtgatttgctatttccccttgtctttctttaaaatggagccgctgttaaacacctgttgatgggcttgccagggctgcgggatgtttggtggtgggatatgtgtggacgcaggattgaacaaatgttgcaacaaccanggaaacaacgctgatggacccatggatgtgacagaattgcagagctgcagtgaccccagatgaaag

SEQ ID NO: 1984 - protein, 311 aa, Homo sapiens
  MOD_RES (12)..(45): Variable amino acid
MEHSHVILEYEXXXXXXXXXXXXXXXXXXXXXXXXXXXXXXXXXXGFPFSVVWCFFVVGLCSRPSVCLFCIVLVGCVFSWFCLFGWFFFCFAVGFVCCCFSSLRFRLLLFVLSGLVFACLLVFIVACPFVFVCFCLFVPASISSSLFAVGLLLLPGVLLLVCSSSFFRFSVFASPDLHPLLFFVVPSSFGLPCFLRFFGPFFLLLSFYVVLLLFVVLSFLSSPLPAGSRVRYLVAWAFFVLFFVVFYCCVVLAFFSFCFVWLFFCGGFLCFFFWFFFFCFLAFGVGLVFRFGGSGSFIFMLFSSPFSSVSL

SEQ ID NO: 1985 - DNA, 1273 bp, Homo sapiens
  source
  (1)..(1273)
  CDS (201)..(1073)
  modified_base (445)..(544): a, t, c, g, unknown or other
  modified_base (597)..(597): a, t, c, g, unknown or other
tgtacatatgtatatatgtacatatgtacatatacgtatatgtacatatatacgtatacatgtacatatatgtatatatgtatatatttattatacatatatgtatatatttatatatttattatacatatatgtatatatttatatgttgagtatttatatgttgagtatatatactcaacatataaatacatacatatatgtataatatatacaaagtatatatacttgagtatatacaaagtatatataatatacactttgtatatatacttgtatatatacttgagtatatatactttgtatatattatacatatatgtatatatttatatggtgagtatttgtatatatactcaacatacaaatatacgtatatgtatgtatatatgtatatttgtatgttgagtatatataaaaatatgtatatacatatatttatatnnnnnnnnnnnnnnnnnnnnnnnnnnnnnnnnnnnnnnnnnnnnnnnnnnnnnnnnnnnnnnnnnnnnnnnnnnnnnnnnnnnnnnnnnnnnnnnnnnnnatatatacaaagtatatatatatatacttgtatatactcaagtatatatactntgtatatattatacatatatgtatatatttatatgttgagtatttatactcaacatataaatatatgtatatacatatatgtatatatttatatggtgagtatttgtatatatactcaacatacaaatatacgtatatgtatgtatatatgtatatttgtatgtttagtatatataaaaatatgtatatacatatatatgttgagtatatatactttgtatatatgtatatatacacacatatatttatatgttgagtatatatactctgtatatattatatatgtatatatttatatgttgagtatatattatatatttatatatttatatgttgagtatttatatatacttgagtatatatatacacatctgtatatatttatatgtcgagtatataaatactcgacatataaatatataatactcaacatatatatatgtatatacataaatatgtatatatttatatgttgagtatttcttttccaaaatgcttgggaccagaagtgttttagattttggatttttttatattttggaatatttgcatatatataatgagatatattggggataggacccaagcctaaataggaaatttatttatgttttatatatactttatacactgaaactgaaggtaactttgtataacattttaaataatcttgtgc

SEQ ID NO: 1986 - protein, 290 aa, Homo sapiens
  MOD_RES (82)..(115): Variable amino acid
  MOD_RES (133)..(133): Variable amino acid
MYNIYKVYILEYIQSIYNIHFVYILVYILEYIYFVYIIHICIYLYGEYLYIYSTYKYTYMYVYMYICMLSIYKNMYIHIFIXXXXXXXXXXXXXXXXXXXXXXXXXXXXXXXXXXYIQSIYIYTCIYSSIYTXYILYIYVYIYMLSIYTQHINICIYIYVYIYMVSICIYTQHTNIRICMYICIFVCLVYIKICIYIYMLSIYTLYICIYTHIYLYVEYIYSVYIIYVYIYMLSIYYIFIYLYVEYLYILEYIYTHLYIFICRVYKYSTYKYIILNIYICIYINMYIFIC

SEQ ID NO: 1987 - DNA, 1798 bp, Homo sapiens
  source
  (1)..(1798)
  CDS (201)..(1598)
  modified_base (264)..(363): a, t, c, g, unknown or other
  modified_base (1415)..(1514): a, t, c, g, unknown or other
ctgtccattgtttaatcatctaaaattattccaagtgaaaagtttatttttaaaaaacagagatacttgccaaggataaaacatctagtccaaggaagaggaagatgaggatgaagtggttgaggatggagttgaggaattaggtagtccttttgggaagctgcattgtcacctggagtgacaatttcccaacttagaagatgttctcttctctgaaggaattaactgccctacactacttcaccacgggggtgaaggatagcnnnnnnnnnnnnnnnnnnnnnnnnnnnnnnnnnnnnnnnnnnnnnnnnnnnnnnnnnnnnnnnnnnnnnnnnnnnnnnnnnnnnnnnnnnnnnnnnnnnngctatccttcagccccttggactcgagacgtacatatcgcgtatacactcactctgcacatgctacatatacgtctacacgctgtcatctcacgcacgtctgcactctgctacatatacgctctacatgtactgcatatgtacgtacactatatacaatcgtctatgctatctacacgtgctactcatacatgtgcatgtctatatgtgtcgcacgtatactgtacgctcacactcactgtgtctcatgtgtatctcatatctgcgtactacacgtatcgtcatctcgcgcatcgcatatacgtatcatcgtcatgcacgcactgctgtgtacgctcgcacatgcatacgcactcatctatatgtctctgtatatcatgtcacacgtacgtgtatctgtgtgcatctcgtatatacgtatcacgcactgctctatgtctgtacactgtatgtgtgtgcactactacgctgtctcatcatgctctgcactctgtcgtactgtacgtgtgctcatatacgctgtgtcatgcatacatatactgctctatatcacacgtctatactcgtacgcgctcgcacactctatgtacatgtctacacatcgtgctcactatacgtctcatatgtgcgtactctgtatatacatgcactgctgtatctcatgtgtacactacgtgtgtgcacatctctgtctatatgtatcatgctgtgtcacgtacgtatatctgtgtgcatgtactcgctgtcatgtgctgctatgctgctactacgtgtacgtcgtcatacgctgtcgcatcatatatgtcgtctgcatactatacgcacacgtgtgtatcactcgctatatactgcacatacgctctgtgtatcatactacacgtctgcatatacgctatcactcatgtactgtctgtcatcactcgtgcacacactacgtatgcgctgctatatctatgtcgcgtatatcgtcatactatgctgtcatcatatgcgcatcacacacactgtatatcatcgcacatactatgctgcagaccaaggggtggaaggaannnnnnnnnnnnnnnnnnnnnnnnnnnnnnnnnnnnnnnnnnnnnnnnnnnnnnnnnnnnnnnnnnnnnnnnnnnnnnnnnnnnnnnnnnnnnnnnnnnncccctcccctcccccccctctccccctcctcccccctccctctcccccctctcccctccccctatcccatctcactccacctaaggccaacgcaaggcataacgcactaagggtctacagggcgaaagccacacacacaaagcaagtcaagcaagcgacccaaaggaagaaatggagtaagatgaagcccagggtttttcaccactaggtttggcccccaggagcaacatctgtaggatgcccggcatcctcctgattggagagtggagtgtctgagtgggagt

SEQ ID NO: 1988 - protein, 465 aa, Homo sapiens
  MOD_RES (22)..(55): Variable amino acid
  MOD_RES (405)..(438): Variable amino acid
MFSSLKELTALHYFTTGVKDSXXXXXXXXXXXXXXXXXXXXXXXXXXXXXXXXXXYPSAPWTRDVHIAYTLTLHMLHIRLHAVISRTSALCYIYALHVLHMYVHYIQSSMLSTRATHTCACLYVSHVYCTLTLTVSHVYLISAYYTYRHLAHRIYVSSSCTHCCVRSHMHTHSSICLCISCHTYVYLCASRIYVSRTALCLYTVCVCTTTLSHHALHSVVLYVCSYTLCHAYIYCSISHVYTRTRSHTLCTCLHIVLTIRLICAYSVYTCTAVSHVYTTCVHISVYMYHAVSRTYICVHVLAVMCCYAATTCTSSYAVASYMSSAYYTHTCVSLAIYCTYALCIILHVCIYAITHVLSVITRAHTTYALLYLCRVYRHTMLSSYAHHTHCISSHILCCRPRGGRXXXXXXXXXXXXXXXXXXXXXXXXXXXXXXXXXXPLPSPPSPPPPPSLSPLSPPPIPSHST

SEQ ID NO: 1989 - DNA, 1333 bp, Homo sapiens
  source
  (1)..(1333)
  CDS (201)..(1133)
tggggggggggggcgcacgcacgtggggggggtggtgcatgggtgtgtgccgacacgtgggtaggcggtcagcgcaggtgtggggatagtgggggtgcgggtaggggtatgggtcacatgtgtgcgtgttatctgcacgcggtgggggtgtgtgtgcgcgcacgtgggtggcagcgcgcaagtgtggtgattgtgtgcacatgggtgtgtgcgtgcattggggtgtcagtgcgcgtgtgggtatctgtgtgcgcgcatgtgtgggtttgcgcgtgtgggtatctgcgtgcgtgggtgtgtgtgggtgggtgtgcatgtatggatatgtgtgggtatgtgtggatgtgtggatatgtgtgtgggtatgtgtgtgtgttgtgcgtgtgggtgtgcacgtgtgtgggtatgtgcgtgtgggggtatgtgtgcacgtgtgtgcgtgcgaacgtgtatgtgcacgtgtgtgggtgcattgtgtctgcacgagggtgtgtgtgcatgcatgtgtgcatgtgggtgggtgtgtgtgtgcacatgcatctgtgggtgtgtttgcatgtgtatgggtatgtgcacgcacgtgtgggggtgtgtgtgcacgtgtcccgtgtgtccatgggagtgtgtgtgcgtgggtatgtgtgggtgtgcatgtgtgggtatgtgtgcacgtgtgtggatatgtgtgcacatgtgtgggtgggtgtgcacatgcatgtgggtatgtctctgtgcatgtgtgtgggtatgtgcgtgtgggtggatatgtgtgcatgtgggggtgggtgtgtgtgtgcacgcatgtgtgggtaagtgtgtgtgtgcatgtgggcgtgcgcgtatgtgtgcatgtgtgtgcggggtatgtctgtgtgcacacgtatgttccgcgtgtgtgcacacaggtgtgggtccgggtgcacgggtgtgggtctgtgtgcacgtgggtgtgggtttgcgtcatgtgggtgcgtgtacgtgtgtgggggtgtgtgcacgcgtgtgggtgtctgcgtgtgtgtggatgtgtgcgtgcgtgtggatgtgtgcatgtggctgtgtgtgtgcacgtgtgcccgtgtgtatgtgcacgtgggtatatgctgtgcgggtatgggtgtgcacacgtgtgatatatacacatgcatatgtgtgtgtgcatgtctgtgcatgaacgttcatgtcttggcctgtgtatagtgtgtgcacatggtcacacgtactggttgtatgcatgctacgtgtgcatgtatgtttcgtgttgtcatgaggtgtgtgtgcatgtgtgtttcatgtgttttcatgcatgcacatacgtgggcatttgtgtgct

SEQ ID NO: 1990 - protein, 310 aa, Homo sapiens
MGVCVHWGVSARVGICVRACVGLRVWVSACVGVCGWVCMYGYVWVCVDVWICVWVCVCVVRVGVHVCGYVRVGVCVHVCACERVCARVWVHCVCTRVCVHACVHVGGCVCAHASVGVFACVWVCARTCGGVCARVPCVHGSVCAWVCVGVHVWVCVHVCGYVCTCVGGCAHACGYVSVHVCGYVRVGGYVCMWGWVCVCTHVWVSVCVHVGVRVCVHVCAGYVCVHTYVPRVCTQVWVRVHGCGSVCTWVWVCVMWVRVRVWGCVHACGCLRVCGCVRACGCVHVAVCVHVCPCVCARGYMLCGYGCAHV

SEQ ID NO: 1991 - DNA, 1513 bp, Homo sapiens
  source
  (1)..(1513)
  CDS (201)..(1313)
  modified_base (394)..(493): a, t, c, g, unknown or other
tggctttggaatgaggtggattagggctggaggggcagacatggagaagagaatgagtgagaggccaggcactgtggatcagtcttcagctccctggatttgggggacttatcaccagccatgggggaggcctggttttcgtacaccagagggacagacggctgctctgctgtgggagcaaagtcctgaagaacatcagcatgcagccctcccacagccacacacacatacacacacacacacacacacacgtgcacataaacacagatacacactcacactcacagatacacatgcacacacagatacacacatgtgtgcacacagagatatacaggtgggcacacacacagatacataaacgtgtacacacagacactcacaggtacatatnnnnnnnnnnnnnnnnnnnnnnnnnnnnnnnnnnnnnnnnnnnnnnnnnnnnnnnnnnnnnnnnnnnnnnnnnnnnnnnnnnnnnnnnnnnnnnnnnnnnggacgcgtgtcacatgtgcacatgcctgtgtgtaggatgcgtgtgtacgtgtgtgctggggatgcgtgtcacgtgtgcacatgcctgtgtgggggatgtgtgtgcacgtgtgtgcctggggacgcgtgtcacgtgtgcacatgcctgtgtgtgtggggatgtgtgtgcacgtgtgtgcctggggacgcatgtcacgtgtgcacatgcctgtgtgtggggggatgcgtgtgcacctgtgtgcctggggacccatgtcacgtgtgcacatgcctgtgtgtggggggatgcgtgtgcacctgtgtgcctggggacccgtgtcacgtgtgcacatgcctgtgtgtggggggatgcgtgtgcacctgtatgcctggggacccgtgtcacgtgtgcacatgcctgtgtggggggggatgcgtgtgcacctgtgtgcctggggacgcatgtcacgtgtgcacatgcctgtgtgtgtggggatgcgtgtgcacctgtgtgcctggggacccgtgtgacgtgtgcacatgcctgtgtgtggggggatgcgtgtgcacctgtgtgcctggggacgcgtgtcacgtgtgcacatgcctgtgtgggggatgcgtgtgcacctatgtgcctagggacgcatgtcacgtgtgcacatacctgtgtgggggggatgcgtgtgcacgtgtgtgcctggggacgcgtgtcacgtgtgcacatgcctgtgtgtgtggggatgcgtgtgcacctgtgtgcctggggacccgtgtcacgtgtgcacatgcctgtgtgtgtggggatgcgtgtgcacctgtgtgcctggggacccgtgtgacgtgtgcacatgcctgtgtgtggggggatgcatgtgcacctgtgtgcctggggacccgtgtgacgtgtgcacatgcctgtgtgtgtgggatgcgtgtgcacctgtgtgcctgggacccagaggtgaaatcacaaccacctgaggtccccagcaccacctgcccccgagctccagcccaggcaccttgccttgctttcatc

SEQ ID NO: 1992 - protein, 370 aa, Homo sapiens
  MOD_RES (65)..(98): Variable amino acid
MQPSHSHTHIHTHTHTHVHINTDTHSHSQIHMHTQIHTCVHTEIYRWAHTQIHKRVHTDTHRYIXXXXXXXXXXXXXXXXXXXXXXXXXXXXXXXXXXDACHMCTCLCVGCVCTCVLGMRVTCAHACVGDVCARVCLGTRVTCAHACVCGDVCARVCLGTHVTCAHACVWGDACAPVCLGTHVTCAHACVWGDACAPVCLGTRVTCAHACVWGDACAPVCLGTRVTCAHACVGGDACAPVCLGTHVTCAHACVCGDACAPVCLGTRVTCAHACVWGDACAPVCLGTRVTCAHACVGDACAPMCLGTHVTCAHTCVGGMRVHVCAWGRVSRVHMPVCVGMRVHLCAWGPVSRVHMPVCVGMRVHLCAWGPV

SEQ ID NO: 1993 - DNA, 1477 bp, Homo sapiens
  source
  (1)..(1477)
  CDS (201)..(1277)
aaaacttcctaaactaacaggagaatcggcaggggtcttaactttcacaaaagatgatacttactgctctgaaggctctttaacgacttgttttatttactctgaaggtacgctacgtaaatcagattcatcaaaagtattcatattgtctaataagaatcctcccgaaattccagtgatccgctaagggagaaggcactatgaaaaagatcatttatgttttctttctcttgtttagcttcataagtcttggttctgcttatgctgaagattactacactaatcctcaagacttagggcaggggacagaaacagtcaacaatgccgatgctggtactggtgctggcaataacaatattgctgattcaatgtcccaggtgacgcaaaacggaatgcaagagcttgattcagtcgttgatagcttaatcacagatgtagataaaaatattaaagacaatattcaaggctactaccaaaaagtaactgctccaattattccagtctttgcaggctttattgtcatttggctgacctttcaaggcatgaaaatgatgctgggtatgcctgttgagattcagcaagttattgcgactttcgtgcttatgctgctgatctggacaatcgttttttcatgggatgccttctttccttatgtagctgaagttttcctagatgatgtgccgaacctgatcactgaaatgacaggcaccgattccaaaaccacacttcaatcatttgtttctattatttttgaagctatcgcactggcttttaacaacattgacacaggcatcaccaacgttgtgagtggctttttcttcgtcctgatttactcctttatcttcgggctggcttgtctagtttgtgctttgttcttcctgatttgggtcatttgcaaagtaatcatcgggattttaattgctgttgcccctatttttcttgctgctgcaatgttcccagctactcgtagatatgcgaccaactggcttcaagcggtattaactccaaacgtggttttactactactgatcgtaagctgcgacctagttttaacttcagtagtgaagggtatccagcacttaaatgataacggcagcaccttcacaggggcttttgtcatggtcattgttctgcttgttgtagtaggtcttttcgcaattattccaaaaattgcaatttctcttgtcggcagcggttttgaagcttcaaccagtgcaactacaggtgtaaccaattctgcgactaatgcagttaaacgctttgggagtaaacgataatgctgcctcaaactaaagatcagctagacgctcaatttaaagcccttcaggaaagcgttaaaaagagtgaaaaccgtaacggcaaaattacactgtggtcgctgggactttgtggggttttagcagtaggaaatattactcaagcaattgctaactacaatctaactccattaaaaacaaccgaaccgatcattgccgtg

SEQ ID NO: 1994 - protein, 358 aa, Homo sapiens
MKKIIYVFFLLFSFISLGSAYAEDYYTNPQDLGQGTETVNNADAGTGAGNNNIADSMSQVTQNGMQELDSVVDSLITDVDKNIKDNIQGYYQKVTAPIIPVFAGFIVIWLTFQGMKMMLGMPVEIQQVIATFVLMLLIWTIVFSWDAFFPYVAEVFLDDVPNLITEMTGTDSKTTLQSFVSIIFEAIALAFNNIDTGITNVVSGFFFVLIYSFIFGLACLVCALFFLIWVICKVIIGILIAVAPIFLAAAMFPATRRYATNWLQAVLTPNVVLLLLIVSCDLVLTSVVKGIQHLNDNGSTFTGAFVMVIVLLVVVGLFAIIPKIAISLVGSGFEASTSATTGVTNSATNAVKRFGSKR

SEQ ID NO: 1995 - DNA, 1564 bp, Homo sapiens
  source
  (1)..(1564)
  CDS (201)..(1364)
cagcatgcaccggacgcccaaaactggtatatcggagtcgccaatcaagactcaccggtgaataaagtctactggcaaaaagcggatggtggcttatgaagtcaacaacccttgaatgacttcgacaggaaaaagaattacagctttcagccacacaagggggagattttttctataattttcattttcagctctatggtatgccctacaccattggtcggctgattgtgacgattgctgcctttatcatgttattgactctgatttcaggaatcattacccataaaaaaatcctgacagacttttttaccctaagagcctttaaaggacagcgctcttatctggattttcataatgtcagttcagtgattgccctgccgttctttttgaccatgacatttaccgggttggcgattttcttttatatcgtgctgccttccggtatgaaaaaactttatccagacaatccctttcaatattttgaagaaattcgcacaatcaatacatcagccacccactcagttcctgtgaaaacccagatgctgccaattcaacattttatcaccacggcacagcaacactggggatatgcggaatttgacaatatcacggtcaagcagcccaatacccagctggcacacataaccttaactcagctcaaagatcattccattacacgaaatcaggcacagcttattttaaatgctgctaccggaaaattgcttgaaaatacacgaaatgaaagtgcaattgccacactaaatgccagcatgtatggtttacatatggcacgttttgccgaacctgttttacgtttagggttatttttctccggcatattaggctgcgcaatgattgcatccggattgctgctgtggagcctgaaacgccagatgcagaaaaaatcagtgcggtttcatctcggacactatttagtgaaccgcttgaatatcaccataattattggcttgccgcttgccatgctgggatatctctatgcgaatcgttttatcagtattcctgtaggtgcaccaaattatgaaatttatagttttttctctatctggcttggcagttttatcctggcatgtgtaaccccacagcaagatatatggagaatgcagcttaaacttctgatttgtgctgcctttataattcccctgattgatatttattatttagtttcccagcaatatgttgattcttttgcgacttattggccttttttgcgtattgatctgatgttatggaccttggcactgcttgccctattgttacaccagaaaattacgcccattcagcaaaaggcggtcaataaaattcaggccaaactaaaatctgtgcagcaggagtcttccacatgatatggatcgcagtaaccgttcttttatggctaagctgctttgccttttatgcggtaagtgcaaagcagatcctaaaaacccgaaaatctcgttacgcttttttagctaattttcctacgcacactaaattcactgcgggtattttcttattcgtggcgatgtttttattacgtacccagtttagctccagtattagcttt

SEQ ID NO: 1996 - protein, 387 aa, Homo sapiens
MPYTIGRLIVTIAAFIMLLTLISGIITHKKILTDFFTLRAFKGQRSYLDFHNVSSVIALPFFLTMTFTGLAIFFYIVLPSGMKKLYPDNPFQYFEEIRTINTSATHSVPVKTQMLPIQHFITTAQQHWGYAEFDNITVKQPNTQLAHITLTQLKDHSITRNQAQLILNAATGKLLENTRNESAIATLNASMYGLHMARFAEPVLRLGLFFSGILGCAMIASGLLLWSLKRQMQKKSVRFHLGHYLVNRLNITIIIGLPLAMLGYLYANRFISIPVGAPNYEIYSFFSIWLGSFILACVTPQQDIWRMQLKLLICAAFIIPLIDIYYLVSQQYVDSFATYWPFLRIDLMLWTLALLALLLHQKITPIQQKAVNKIQAKLKSVQQESST

SEQ ID NO: 1997 - DNA, 1624 bp, Homo sapiens
  source
  (1)..(1624)
  CDS (201)..(1424)
  modified_base (246)..(345): a, t, c, g, unknown or other
  modified_base (1445)..(1544): a, t, c, g, unknown or other
tagtatatgggaccactgtcacatatgtggtccatcattgatggacatgtcattattcagtacatgactgtatgtatatatacacatacaaacatttataatgtgcttgtgaatgtgtatatatattcatatcacacacatgtagatatatcctaatatatgtataaatagtatatacataattgaaatacatcattttaatggttcaagaacagcctagcttggatccggccataagggccaatnnnnnnnnnnnnnnnnnnnnnnnnnnnnnnnnnnnnnnnnnnnnnnnnnnnnnnnnnnnnnnnnnnnnnnnnnnnnnnnnnnnnnnnnnnnnnnnnnnnnctgttgggtggcatgttctatcttctgttgttgggtggagcgttctatcttctgttgttgggtggagcgttctatcttctgttgttgggtggagcgttctatcttctgttgggtggcacgttctgtattctgttgttgggtggcgtgttctgtattctgttgttgggtggcgtgttctatattctgttgttgggtggcgtgttctatattctgttgggtggcatgttctatattctgttgttgggtggcgtgttctatattctgttgttggtggcgtgttctactgttgttgggtggagtgttctatcttctgttgttgggtggcgtgttctatcctctgttgttgggtggagtgtactgtattctgttgttgggtagattgttctatattctcttgttggatggcatgttctatcttctgtagttgggtggcgtgttctgtattctgtagttgggttacatgttctatattccattgttgggtggcgtgttctatattctgttgttgggtggagtgctgcatattctgttgttgggtggcgtgttctatattctgttgttgggtggcgtgttctatattctggcgttgggtggcgtgttctatattctgttgttgggtggagcgtctatcttctgttggtggcgtgttctgtattctgttgttgggtggcgtgttctgtattctgttgttgggtggcgtgttctatattctgtttttgggtggattgtatattctggtgttgggtggattgttctatcttctgttgttgggtggagtgttctatattctgttgttgggtggaatgttgtctattctgttgttgggtggattgttctatattctgttgttgggtggtgtgttttatattctgttgttaggtagcgtgttgtatattctgttgttgggtggcgtgttctatattttgttgatggcgtgttctatattctgttgttgggtggattgttctatcttctgttgttgggtggcgtgttctatattctgttgttgggtggattgttctatcttctgttgtgtggatggcgtgttgtatattctgttgttgggtggcgtgttctaaattcccgttgttgggtggatnnnnnnnnnnnnnnnnnnnnnnnnnnnnnnnnnnnnnnnnnnnnnnnnnnnnnnnnnnnnnnnnnnnnnnnnnnnnnnnnnnnnnnnnnnnnnnnnnnnnatattctgttgttgggtggcgtgttctgtattcttttgttggtggggtgttctatattctgttgttggtggagtgttctg

SEQ ID NO: 1998 - protein, 407 aa, Homo sapiens
  MOD_RES (16)..(49): Variable amino acid
MVQEQPSLDPAIRANXXXXXXXXXXXXXXXXXXXXXXXXXXXXXXXXXXVGWHVLSSVVGWSVLSSVVGWSVLSSVVGWSVLSSVGWHVLYSVVGWRVLYSVVGWRVLYSVVGWRVLYSVGWHVLYSVVGWRVLYSVVGGVFYCCWVECSIFCCWVACSILCCWVECTVFCCWVDCSIFSCWMACSIFCSWVACSVFCSWVTCSIFHCWVACSIFCCWVECCIFCCWVACSIFCCWVACSIFWRWVACSIFCCWVERLSSVGGVFCILLLGGVFCILLLGGVFYILFLGGLYILVLGGLFYLLLLGGVFYILLLGGMLSILLLGGLFYILLLGGVFYILLLGSVLYILLLGGVFYILLMACSIFCCWVDCSIFCCWVACSIFCCWVDCSIFCCVDGVLYILLLGGVF

SEQ ID NO: 1999 - DNA, 1120 bp, Homo sapiens
  source
  (1)..(1120)
  CDS (201)..(920)
tgcgaccattcttgattacctttcacgctcctcttacctcctcacctctcctgtcctctttgccctcattctacttttcctgcgctatatttcgtcttgttcaccttccggacctttcgcgctgcgttaccgcttgtcttttacctcctcttcatcgtgcgttcctccgtttgtctcattctctgtgtagtatcttgtccatgctcttccccgcctcgcttcgtgtttgtcctcactgtctttcactccgtcttcgtcgtgttcccgttctttctccgcttcttgtcgttctttttcctctccatgctctttctttccttcccgtttctccctttcctcacgtcacccctctcccttgcctcccctctcctcgtcctttaatctcgttcttttccttcttgccctcttgctctctctttcctgctttcccccgttatctttgttctgctctctcccttctccctgcttccttcttcttccatgcttccctcctttcttttgctcttcctccccgctgtctccttctccttctcctttcgtttgcctgtcttggtcttttctgttctttcgtcctattcttttccgtcggtcttctagttgtctgttttctctctccttgcctccttggttttgttttcgttctgtttttttttcttcttcgctggttgtttcttctgtgttctttctttcttctatcttccttctttcgtgactgtcttgcttgttctctttctttcctttttctttcgcttggtgcgttagtttcccgtttcttcctcctcctgtatccttcccttcctcccttgttttcttgctttccttcctcattccctccgttccttccctccctctcgcctctggggaagtgggcacttaacttgcaaattatcatgaggatttcaatgagttattccatataaaacactagggaaaatgctgggcacatagtaggtgcttaaatattagatatttttaaaatttttattttaaaattgtaagtggacaaattacagttgtatgtatttatggagtaaaaagtgatatgatttgtgaatacagtgtgggataatttaacctacttaacatgtctctcactgcaaatacttattttttgtggtga

SEQ ID NO: 2000 - protein, 239 aa, Homo sapiens
MLFPASLRVCPHCLSLRLRRVPVLSPLLVVLFPLHALSFLPVSPFPHVTPLPCLPSPRPLISFFSFLPSCSLFPAFPRYLCSALSLLPASFFFHASLLSFALPPRCLLLLLLSFACLGLFCSFVLFFSVGLLVVCFLSPCLLGFVFVLFFFLLRWLFLLCSFFLLSSFFRDCLACSLSFLFLSLGALVSRFFLLLYPSLPPLFSCFPSSFPPFLPSLSPLGKWALNLQIIMRISMSYSI

SEQ ID NO: 2001 - DNA, 1447 bp, Homo sapiens
  source
  (1)..(1447)
  CDS (201)..(1247)
tccagcagcccttccagcaggaaagcctctgattggccaagagagggtcacatgtccatctctgaaccaataagagcattcagatcaggcctttgattggcaggcctgggtcccgcccggtttataaacaactcagagaggatgagccaccctcccagatcacacaacatggctgtcccttgctctgctcgtgtgtgtgtatgtgtgtgtgtgtggtgtggtgcgtgtggtgcatgtgtgtggtgtctgtgtgtgtggtatgtgcgtggtctgtgtctggtgtgtgtatggtgtatatgtctgtgtgtggtgtgtgtgttgtgtgtgtatggtgtgtgtgtgtggtgtgtgtgtgtggtgtgtgtggtgtgtgtgtgtggtgtgcgtatggtgtatgtgtctgtggtgtgtgtgtggtgtgtgtgtctggtatttgtgtgtggtgtgtgtgtggtgtatgtgtggtgcgtatggtgtatgagtctgtgtgtgtggttgtgtgtgtggtgtgtgtgtgttgtgtgtgtgtgtgttgtgtgtgtgtgtggtgtgtgtatctgtgtggtgtgtgtctggtgtatatgtctgtgtgtgtggtgtgtgtctgtgtgtggtgtgtgagtggtgtgtgtctgtgtcgtgtgtctgtgtggtgtgtgtgtatgtgtggtgtgtgtctgtgtggtgtgtgtggtatgtgtgtgtctgtgtgtgatgtttatgtgtgtggtgtgtgtgtggtgtatggtgtgtctgtgtgtgggtgtgtctgtgtgaggtgtgtgtgtgtggcgtgtgtctgtctgtgtgtgtggtgtgtgtctgggcccccaagctctggctcctgtaaggccacctttcctgccccctcctcctctgatcacatcgtcgggtatgagccacaagtcccacctgctctgctggacgggacttccctggccggggtggggcctcgctcatctctgaacctcctctcccaacccaccctccagggcgcctcccagccctgggcctcgcttgctgtgtggattctgggagcccttgggctgggaaggacctatggtccccacctccaggcacaggcagctcgccccctccaggggctccctggggtggctggtttgggggaagtcgatccgaccctccaccccctaaatcggcccggcctcgagtcagggacgtcccccagaggctccgatgcccctttccagctgcgcgacttggagcaggttccgcatccacgatagcgagggggtccgggcgcggtggctcacgcctgtaattccagcactttgggaggtcaaggtgggcggatcatctgaggccaggagtttgagaccagcctggccaacatggtgaaaccctgtctctactaaaaatacaaaattagttgggcgtggtggcaggcgcctgtaatcccagctactcgggaggctgaggcaggaca

SEQ ID NO: 2002 - protein, 348 aa, Homo sapiens
MCVCVVWCVWCMCVVSVCVVCAWSVSGVCMVYMSVCGVCVVCVWCVCVVCVCGVCGVCVWCAYGVCVCGVCVVCVSGICVWCVCGVCVVRMVYESVCVVVCVVCVCCVCVCCVCVWCVYLCGVCLVYMSVCVVCVCVWCVSGVCLCRVSVWCVCMCGVCLCGVCGMCVSVCDVYVCGVCVVYGVSVCGCVCVRCVCVACVCLCVWCVSGPPSSGSCKATFPAPSSSDHIVGYEPQVPPALLDGTSLAGVGPRSSLNLLSQPTLQGASQPWASLAVWILGALGLGRTYGPHLQAQAARPLQGLPGVAGLGEVDPTLHPLNRPGLESGTSPRGSDAPFQLRDLEQVPHPR

SEQ ID NO: 2003 - DNA, 1840 bp, Homo sapiens
  source
  (1)..(1840)
  CDS (201)..(1640)
  modified_base (1)..(1): a, t, c, g, unknown or other
  modified_base (12)..(12): a, t, c, g, unknown or other
  modified_base (20)..(20): a, t, c, g, unknown or other
  modified_base (29)..(29): a, t, c, g, unknown or other
  modified_base (39)..(39): a, t, c, g, unknown or other
  modified_base (48)..(48): a, t, c, g, unknown or other
  modified_base (51)..(51): a, t, c, g, unknown or other
  modified_base (61)..(61): a, t, c, g, unknown or other
  modified_base (75)..(75): a, t, c, g, unknown or other
  modified_base (77)..(77): a, t, c, g, unknown or other
  modified_base (95)..(96): a, t, c, g, unknown or other
  modified_base (98)..(99): a, t, c, g, unknown or other
  modified_base (110)..(112): a, t, c, g, unknown or other
  modified_base (120)..(120): a, t, c, g, unknown or other
  modified_base (126)..(126): a, t, c, g, unknown or other
  modified_base (130)..(130): a, t, c, g, unknown or other
  modified_base (134)..(134): a, t, c, g, unknown or other
  modified_base (143)..(143): a, t, c, g, unknown or other
  modified_base (146)..(148): a, t, c, g, unknown or other
  modified_base (150)..(150): a, t, c, g, unknown or other
  modified_base (152)..(152): a, t, c, g, unknown or other
  modified_base (155)..(156): a, t, c, g, unknown or other
  modified_base (158)..(158): a, t, c, g, unknown or other
  modified_base (161)..(162): a, t, c, g, unknown or other
  modified_base (182)..(182): a, t, c, g, unknown or other
  modified_base (186)..(186): a, t, c, g, unknown or other
  modified_base (189)..(189): a, t, c, g, unknown or other
  modified_base (192)..(194): a, t, c, g, unknown or other
  modified_base (224)..(227): a, t, c, g, unknown or other
  modified_base (235)..(235): a, t, c, g, unknown or other
  modified_base (241)..(242): a, t, c, g, unknown or other
  modified_base (249)..(249): a, t, c, g, unknown or other
  modified_base (264)..(264): a, t, c, g, unknown or other
  modified_base (266)..(266): a, t, c, g, unknown or other
  modified_base (270)..(369): a, t, c, g, unknown or other
  modified_base (409)..(409): a, t, c, g, unknown or other
  modified_base (429)..(429): a, t, c, g, unknown or other
  modified_base (437)..(437): a, t, c, g, unknown or other
  modified_base (481)..(481): a, t, c, g, unknown or other
  modified_base (489)..(489): a, t, c, g, unknown or other
  modified_base (506)..(506): a, t, c, g, unknown or other
  modified_base (528)..(528): a, t, c, g, unknown or other
  modified_base (578)..(579): a, t, c, g, unknown or other
  modified_base (605)..(605): a, t, c, g, unknown or other
  modified_base (644)..(644): a, t, c, g, unknown or other
  modified_base (647)..(647): a, t, c, g, unknown or other
  modified_base (664)..(664): a, t, c, g, unknown or other
  modified_base (711)..(711): a, t, c, g, unknown or other
  modified_base (715)..(715): a, t, c, g, unknown or other
  modified_base (737)..(737): a, t, c, g, unknown or other
  modified_base (837)..(837): a, t, c, g, unknown or other
  modified_base (912)..(912): a, t, c, g, unknown or other
  modified_base (965)..(965): a, t, c, g, unknown or other
  modified_base (999)..(999): a, t, c, g, unknown or other
  modified_base (1053)..(1053): a, t, c, g, unknown or other
  modified_base (1089)..(1089): a, t, c, g, unknown or other
  modified_base (1132)..(1132): a, t, c, g, unknown or other
  modified_base (1196)..(1196): a, t, c, g, unknown or other
  modified_base (1213)..(1214): a, t, c, g, unknown or other
  modified_base (1217)..(1217): a, t, c, g, unknown or other
  modified_base (1284)..(1284): a, t, c, g, unknown or other
  modified_base (1290)..(1291): a, t, c, g, unknown or other
  modified_base (1293)..(1294): a, t, c, g, unknown or other
  modified_base (1297)..(1298): a, t, c, g, unknown or other
  modified_base (1300)..(1301): a, t, c, g, unknown or other
  modified_base (1310)..(1310): a, t, c, g, unknown or other
  modified_base (1322)..(1322): a, t, c, g, unknown or other
  modified_base (1332)..(1332): a, t, c, g, unknown or other
  modified_base (1335)..(1335): a, t, c, g, unknown or other
  modified_base (1345)..(1345): a, t, c, g, unknown or other
  modified_base (1350)..(1350): a, t, c, g, unknown or other
  modified_base (1352)..(1352): a, t, c, g, unknown or other
  modified_base (1393)..(1399): a, t, c, g, unknown or other
  modified_base (1402)..(1402): a, t, c, g, unknown or other
  modified_base (1409)..(1409): a, t, c, g, unknown or other
  modified_base (1419)..(1421): a, t, c, g, unknown or other
  modified_base (1426)..(1426): a, t, c, g, unknown or other
  modified_base (1437)..(1439): a, t, c, g, unknown or other
  modified_base (1450)..(1453): a, t, c, g, unknown or other
  modified_base (1458)..(1458): a, t, c, g, unknown or other
  modified_base (1461)..(1461): a, t, c, g, unknown or other
  modified_base (1464)..(1464): a, t, c, g, unknown or other
  modified_base (1466)..(1467): a, t, c, g, unknown or other
  modified_base (1471)..(1471): a, t, c, g, unknown or other
  modified_base (1474)..(1474): a, t, c, g, unknown or other
  modified_base (1483)..(1483): a, t, c, g, unknown or other
  modified_base (1485)..(1485): a, t, c, g, unknown or other
  modified_base (1492)..(1492): a, t, c, g, unknown or other
  modified_base (1514)..(1613): a, t, c, g, unknown or other
  modified_base (1649)..(1650): a, t, c, g, unknown or other
  modified_base (1704)..(1704): a, t, c, g, unknown or other
ntgtgctgctgntgtgctgnttgttcccncgcctgctgngttgtttgnctncccctccgcnctgccgtttttcgntntgcttcgtgttctgctcnngnncgttgttcttnnngggttcgngcctgntgtncgtnttttgcttnccnnntncngcnntngtnntggctctccgtccccgtggntggnggngcnnnttcaaaatgaaagggggggcatggttctannnnatgttgtncgtganncggttgnggttggttggctcantntccnnnnnnnnnnnnnnnnnnnnnnnnnnnnnnnnnnnnnnnnnnnnnnnnnnnnnnnnnnnnnnnnnnnnnnnnnnnnnnnnnnnnnnnnnnnnnnnnnnnnttcctcctctccttcctcccttctttccccttccctctcntcctctctctttttttttcnttctttcnctcccccctcttttttttctcccttccctttttcttttccctcntcttcccncctcctttttcttttcnctctccccctttcctcctttcncttttttccctccttttttttccctcccctcttttttttttctcttttcnnctcttttctttccccttctttttttnctttttcctcctctcctcttttcttttttcccctttccnttnttccctttttttttccnccttttttttcccctccttttttttctccctttttttttttttttcnctcntccccctctcttctttcttttnccctttttctccccttttttctccctttctctcccccttttttttcctttttcttccctctcctttcctcctttccccttttctttcctttccccttccntcttttcctttcccttccttttctttttccttttttttttttcctttcccccctttcttccccttttttcctctncctttcttcccctcctttcctttctttccttcctttccttttttcctttcctnccctcttttttctccccctttttccccctttccntccttttcttcctttttttcttttttttcttttttttcttccttttctctctcnttcttctttttttcttctcttccttttttccttttnttcctttccttcttttctttttccttcctcctttctcttcctncttcccttccctcctttcccttttttccccttttcttttttcttttccccttctttttttctcnccctctttttttttccnnccncccttcttctttcttttcttcctttccttcttcctccccttctctcttccctttcttctccccttcnttttcnncnnttnntnnttttttttntttccctttctntttttttccnccncccccctttnttttntncccccctttttttctcaacttttcttttttttaaaactctnnnnnnnctntcccttntttttttttnnnccccnccggctttttnnnccccaccgcgnnnntttgnccnttncnntggngcngttcatttncnttgggcncttcttttttttaagaaccccnnnnnnnnnnnnnnnnnnnnnnnnnnnnnnnnnnnnnnnnnnnnnnnnnnnnnnnnnnnnnnnnnnnnnnnnnnnnnnnnnnnnnnnnnnnnnnnnnnnngggttttcctatgtgggcgtgccctaacataccagnnaatcccgccccctccttatgcccttaggccgccctgtctatcataagggcgganggggggggaaaatcggctatgcccccagaacccacgggggcccccttggcgttctttacactggatcggtgggggggggttaacaacgcgtgaccctagggggggcgttttgtttttcccttcccggagtttgcct

SEQ ID NO: 2004 - protein, 479 aa, Homo sapiens
  MOD_RES (8)..(9): Variable amino acid
  MOD_RES (12)..(12): Variable amino acid
  MOD_RES (14)..(14): Variable amino acid
  MOD_RES (17)..(17): Variable amino acid
  MOD_RES (22)..(22): Variable amino acid
  MOD_RES (24)..(57): Variable amino acid
  MOD_RES (70)..(70): Variable amino acid
  MOD_RES (77)..(77): Variable amino acid
  MOD_RES (94)..(94): Variable amino acid
  MOD_RES (97)..(97): Variable amino acid
  MOD_RES (110)..(110): Variable amino acid
  MOD_RES (127)..(127): Variable amino acid
  MOD_RES (135)..(135): Variable amino acid
  MOD_RES (149)..(149): Variable amino acid
  MOD_RES (155)..(155): Variable amino acid
  MOD_RES (171)..(172): Variable amino acid
  MOD_RES (179)..(179): Variable amino acid
  MOD_RES (213)..(213): Variable amino acid
  MOD_RES (238)..(238): Variable amino acid
  MOD_RES (267)..(267): Variable amino acid
  MOD_RES (285)..(285): Variable amino acid
  MOD_RES (297)..(297): Variable amino acid
  MOD_RES (311)..(311): Variable amino acid
  MOD_RES (338)..(338): Variable amino acid
  MOD_RES (362)..(362): Variable amino acid
  MOD_RES (364)..(367): Variable amino acid
  MOD_RES (370)..(370): Variable amino acid
  MOD_RES (378)..(379): Variable amino acid
  MOD_RES (382)..(382): Variable amino acid
  MOD_RES (384)..(384): Variable amino acid
  MOD_RES (398)..(401): Variable amino acid
  MOD_RES (403)..(403): Variable amino acid
  MOD_RES (407)..(407): Variable amino acid
  MOD_RES (409)..(409): Variable amino acid
  MOD_RES (413)..(413): Variable amino acid
  MOD_RES (417)..(418): Variable amino acid
  MOD_RES (420)..(425): Variable amino acid
  MOD_RES (428)..(429): Variable amino acid
  MOD_RES (431)..(431): Variable amino acid
  MOD_RES (439)..(471): Variable amino acid
MKGGAWFXXMLXVXRLXLVGSXSXXXXXXXXXXXXXXXXXXXXXXXXXXXXXXXXXXPPLLPPFFPLPSXPLSFFFXLSLPPLFFLPSLFLFPXLPXSFFFSLSPFPPFXFFPPFFSLPSFFFLFSXLFFPLLFXLFPPLLFSFFPFPXFPFFFXLFFPLLFFLPFFFFFXXPPLFFLXPFFSPFFSLSLPLFFPFSSLSFPPFPFSFLSPSXFSFPFLFFFLFFFSFPPFLPLFSSXFLPLLSFLSFLSFFPFLPSFFSPFFPLSXLFFLFFFFFFFFFLFSLXLLFFFSSFFPFXPFLLFFFLPPFSSXFPSLLSLFSPFLFSFPLLFFSPSFFFXPPFFFLFFLSFFLPFSLPFLLPFXFXXXXFFXFPFLFFSXXPLXFXPPFFSQLFFFLKLXXXXPXFFFXPXRLFXPHRXXLXXXXXXFIXXGXFFFLRTPXXXXXXXXXXXXXXXXXXXXXXXXXXXXXXXXXGFSYVGVP

SEQ ID NO: 2005 - DNA, 1486 bp, Homo sapiens
  source
  (1)..(1486)
  CDS (201)..(1286)
gataaaaatgtaactaagcaagaaaacagttattggcaaattttctgtaaaggaccaaatagaaaatattttaggctgtataggccatacaggctctgtgacaactacttggcactgtcattgtggcacaaaaaaatatagccacggacaatatataacaaatggtcatggctgtgttccaataaatctttatatatatatgtgtatatacacatacgtgtatatatacgtgtatatacgtgtatgaacacatacgtgtatatatacgtgtatacacgtgtatgtacacatacgtgtatatatacacgtgtatatatgtgtatgtacacatacgtgtatatatacgtgtatatacgtgtatgtacacaggtgtatatatacgtatatgtacgtatatgtgtatatatgtgtatatatgtgtatatatacgtatacgtgtatatatgtgtatatacgtatacgtgtatatatgtgtatatacgtatatatacgtatatgtgtatatatgtgtatttatacgtatatgtgtattatgtgtatatatacgtatatgtgtatatatgtgtatatatacgtatatgtgtatatgtgtatatatacttatatatgtgtatatgtgtatatatgtgtatatgtgtatatgtgtatatatgtgtatgtgtatatatacatatatgtgtatgtgtatacatgtgtatgtgtatatatacatatatgtgtatatatacatgtatgtgtatatatacatatgtgtatgtgtatatatacatatgtgtatgtgtatatatacatatgtgtatgtgtatatatacatatgtgtatgtgtatatatacatatgtgtatatatacatatgtgtatatatgtatatatgtatatatacatatgtgtatatatgtatatatgtatatatacatatatgtgtgtatatatgtatatatgtgtatttatatatgtgcatgtgtgtataaatatgtatatattatatgtgtgtatatatacatatatgtatgtatatatacatatatacatacatatatacatatatacacacatatacgcacatatagacatatatatgtatatatacacacatatatacatatatatgtatatatacacacatatatacatatatatgtatatatacacacatatatacatatatgtatatatacacatatatatgtatatatacacatatatatgatatatatgataagctgtatttggcacacaagacacagtttgttggttcctagaccagaaagtgctggaactttgtagattttgatacaatggataattatttgagtgactggattagtctgaaactttcctattgtattagccaatcatagctatataaaggatatgccattcagaattggggctactaaaaaacagatgttctttagttgattgaatttccttgccatgtcagaaatggaactcttcacttttggggattaaagtccaggttacca

SEQ ID NO: 2006 - protein, 361 aa, Homo sapiens
CVYTHTCIYTCIYVYEHIRVYIRVYTCMYTYVYIYTCIYVYVHIRVYIRVYTCMYTGVYIRICTYMCIYVYICVYIRIRVYMCIYVYVYICVYTYIYVYVYICVFIRICVLCVYIRICVYMCIYTYMCICVYILIYVYMCIYVYMCICVYMCMCIYTYMCMCIHVYVYIYIYVYIYMYVYIYICVCVYIHMCMCIYTYVYVYIYICVCVYIHMCIYTYVYICIYVYIHMCIYVYMYIYIYVCIYVYMCIYICACVYKYVYIICVYIYIYVCIYTYIHTYIHIYTHIRTYRHIYVYIHTYIHIYVYIHTYIHIYVYIHTYIHICIYTHIYVYIHIYMIYMISCIWHTRHSLLVPRPESAGTL

SEQ ID NO: 2007 - DNA, 1489 bp, Homo sapiens
  source
  (1)..(1489)
  CDS (201)..(1289)
atacatactactaaacattctgttggctgtgagaatatatatatacacacacacacatacacacactgtgagaatgttccatatgtatatatatatgtatatgtatgttcagtgtgtgtgtatatatgtatatgtgcatatatatgtatatatgtgtatatatacacacacactgaacatacatatatatatatacacatatggaacattctcacagtgtatgtatgtgtgtatgtgtatatatatacatatatacgtgtatatatgtgtgtatatatgtatgtgtgtgtatatatatacatatacacacatatatacgtgtatatatgtgtgtatatatatacatatacacacatatatacgtgtatatatgtgtgtatatatgtgtgtgtatatatatatacatatacacacatatatatacatatatacacacactgaacatacatatatatatatacacacacatatggaacattctcacagtgtatgtatgtgtgtgtgtatatctatatacatgtatatatatgtatgtatatatatacatatatacacatatgtatatatacgtaccatatatgtatatgtgtatatatacgtatatatacatgtatatatacgtatatatacacatatacatatatacatttatatatacgtatatatacgtatacatatatatacacgtatatatacatacatatatacacgtgtatatatacgtatacatatatacacgtgtatatatacgtatacatatatatacacgtgtatatatacgtatacatatatacacgtgtatatatacgtatacatatatacacgtgtatatatacgtatacatatatacacgtgtatatatacgtatacatatatacacgtgtatatacatacatatatacacgtgtatatacatatgtatatacacgtgtatatatgtatatgtatacatatacgtatatatacatgtatatacacgtatatatacgtgtatatatgtatacatatacgtatatatacgtgtatatatgtatacatatacgtatatatacgtgtatatatgtatacaacatatacatatatacatgtatatatacatatatacatatatacgtatatatgtatgtgtatatatgtatatacctatgtatgtatatatacacatatatacgtatatatgtatatatatacacatgttccatatgtgtgtatatatatacacacacacactgaacatactgaacaatactgaacatatcctatatatacatgctgaacatatatactgaacatattcaatatattaatattcaatactcaacatacattcaatattgaatatattcatattgaattatctggtattagcatagtcgtgctcatttattttaatgatactttctcagtaatcctatgttttcaaattatagactatttcccccatctcattcttctcattcttctcctgcactctacccccttcatttgt

SEQ ID NO: 2008 - protein, 362 aa, Homo sapiens
MEHSHSVCMCVCVYIYIYTCIYVCIYVCVCIYIHIHTYIRVYMCVYIYIYTHIYVYICVYICVCIYIYIYTHIYTYIHTLNIHIYIYTHIWNILTVYVCVCVYLYTCIYMYVYIYIYTHMYIYVPYMYMCIYTYIYMYIYVYIHIYIYTFIYTYIYVYIYIHVYIHTYIHVYIYVYIYTRVYIRIHIYTRVYIRIHIYTCIYTYTYIHVYIYVYIYTRVYIRIHIYTCIYIHIYTCIYICIYTCIYVYVYIYVYIHVYTRIYTCIYVYIYVYIRVYMYTYTYIYVYICIQHIHIYMYIYIYTYIRIYVCVYMYIPMYVYIHIYTYICIYIHMFHMCVYIYTHTLNILNNTEHILYIHAEHIY

SEQ ID NO: 2009 - DNA, 1342 bp, Homo sapiens
  source
  (1)..(1342)
  CDS (201)..(1142)
  modified_base (64)..(64): a, t, c, g, unknown or other
  modified_base (66)..(66): a, t, c, g, unknown or other
  modified_base (74)..(74): a, t, c, g, unknown or other
  modified_base (413)..(434): a, t, c, g, unknown or other
  modified_base (956)..(1055): a, t, c, g, unknown or other
tacacaacttggcaacatgtaaacgtttttttttccaaaaaaaaaaataacacacacacacacncncacacacncacacacatatacgtgtatatatacgcgtgtatatacgcgtgtatataagcgtgtatatacacgtatatatatacgtatatgtgtataatacgtgtatatacgtatatatacatacacacgtatacatgcatatatacacacatatatacatacatatatacatgtatacgtgtatgtatacatatatacgtatatatacatatatacgtgtatatatacatatatacatatacacatatgtgtgtgtatatacatatgcatatatgtgtgtatatatacatatacatatatgtgtgtatatacgtatacatacatgtgtatatatatatacatgtacnnnnnnnnnnnnnnnnnnnnnnatgtacatatgtgtatttatgtacacatatgtacatatgtgtatttatgtacacacatgtacatatgtgtatatatgtatacgcatgtacatatatgtgtatatatgtatacacatgtacatatatgtgtatttatgtatacgcatgtacatatatgtgtatttatgtacacgcatgtacatatatgtgtatttatgtatacacatgtacatatatgtatttatgcatacacatgtacatatgtgcacatacgtatacatacatgcacatatatgtgtatatatgtatacatatatgtatgtatatgtgcatatacgtatacatatgtgcacatatacatgtgtatacacatatgtatgtatatgtatatatacacatatatgtgtgtgtatatgtatatatacacatatatatgtgtgtaggtgtgtatatgtatatatacacatatgtgtgtgtatgtgtgtgtgtatatatatatatgcacacacccctatatatgatgtgtatgtatatataacacgnnnnnnnnnnnnnnnnnnnnnnnnnnnnnnnnnnnnnnnnnnnnnnnnnnnnnnnnnnnnnnnnnnnnnnnnnnnnnnnnnnnnnnnnnnnnnnnnnnnngcctttcgtgtagttacaccaaaaattaaaaaaaatcctgccatttttgacagcatggatgaacctggaggacattatgccaggtgaggaattttttttttttttttttttttttgagacgtagtctcgctctgtcaccaggctggagtgcagtggtgcaatcttggctcactgtaacctctgcctcccaggttcaggcagttctcctgcctcagcctcgtgagtagctgggactacaggtgcacaccgccacgcccagccaattttttgtattttagtagagacga

SEQ ID NO: 2010 - protein, 313 aa, Homo sapiens
  MOD_RES (72)..(78): Variable amino acid
  MOD_RES (253)..(285): Variable amino acid
MHIYTHIYIHIYMYTCMYTYIRIYTYIRVYIHIYIYTYVCVYTYAYMCVYIHIHICVYIRIHTCVYIYTCTXXXXXXXMYICVFMYTYVHMCIYVHTCTYVYICIRMYIYVYICIHMYIYVYLCIRMYIYVYLCTRMYIYVYLCIHMYIYVFMHTHVHMCTYVYIHAHICVYMYTYMYVYVHIRIHMCTYTCVYTYVCICIYTHICVCICIYTHIYVCRCVYVYIHICVCMCVCIYIYAHTPIYDVYVYITRXXXXXXXXXXXXXXXXXXXXXXXXXXXXXXXXXAFRVVTPKIKKNPAIFDSMDEPGGHYAR

SEQ ID NO: 2011 - DNA, 2125 bp, Homo sapiens
  source
  (1)..(2125)
  CDS (201)..(1724)
  CDS (1767)..(1925)
gaacggccgagtgcgggcgcggctagccgcagtgcagccccgcggggcccgagggcccggcgcgggggcccaaggtgtagttcttgtgccccggggcggcctcggggcccgcgccggggccggggccggggccggcggaggaggccggcagcgaggtggcggcccggcggcggagccgcgccgcagcttgggccagcttcatgcagcgccacttcggcgcgctcctgcagctgggcgtcaacaagttctcgctgcggatgttcggcagccagaaggccgtggagcgcgagcaggagcgcgtccagtcagcggggtcctggatcatccacccgtacagcgacttcaggttctactgggacttcaccatgctgctgttcatggtgggaaacctcatcatcatcccagtgggcatcaccttcttcaaggacgagaccactgccctgtggatcgtgttcaacgtggtctcggacaccttctgcctcatggacctggtgttgaacttccgcaccggcattgtgatcgaggacaacacggagatcatcctggaccaagagaagatcaagaagtacgtgcgcacgtggttcatggtggacttcgtgtcctccatccccgtggactacatcttcctcatcgtggagaagggcatcgactccgaggtctacaagacggcgtgcgccctgcggatcgtgcgcttcaccaagatcctcagcctcctgcggctgctgcgcctctcgcgcctgatccgctacatccaccagtgggaggagatcttccacatgacctatgacctggccagcgcggtgatgcggttctgcaacctcatcagtatgatgctgctgctctgccactgggatggctgcctgcagttcctggtggccatgctgcaggacttcccgtgcaactgctgggtgtccatcaatggcatggtgaaccactggtggagcgaactgtattccttcgcactcttcaaggccatgagccacatgctgtgcattgggtatggccggcaggcgcccgagagcatgacggacatctggctgaccatgctcagcatgattgtgagtgacacctgctacgccatgttcatcggccacgccactgccctcatccagtcgctggactcctcgcggcgccaataccagaagtacaagcaggtggagcagtacatgtccttccacaagctgccggccgacttccgccagaagatccacgactactacgagcaccgttaccagggcaagatgttcgacgaggacagcatcctgggcgagctcaacgggcccctgcgggaggagattgtcaacttcaactgccggaagctggtgacctccatgccgctgttcgccaatgctgaccccaacttcgtcacggccatgctgaccaagctcaagttcgaggtcttccagccgggtgactacctcatccgcgaaggcaccatcgggaagatgtacttcattcagcacggcgtggtcagcgtgctcgctaagggcaacaaggagatgaagctgttcgatggctcctacttcggagagatctgcctgctcacccggggccaccgcatggcgagcgtgcgggccaacacctattgccgcctcctttcgctgagcgtggacaacttcaacgaggtgctggaggagtaccccatgatgcggcgcgccttcgagacggtggccatcgaccgcctggaccgcatcggcaagaagaattccatcctcctgcacaaggtgcagcatgaccttaactcgggcgtattcaacaaccagtagaacgccatcatccaggagatcgtcaagtacgacggcgagatggtgcagcaggccgagctgggtcagcgcctgggcctcttcccgccgccgccgccgccgcaggtcacctcggccatcgccacgctgcagcaggccgtggtcatgagcttctgcccgcaggtggcgcggccgctcgtggggccgctggcgctcggctcgccgcgcctcgtgcgccgcccgcccccggggcccgcacctgccgccgcctcacccgggcccccgccccccgccagccccctgggcgcgcccgccagcccccgggcaccgcggacctcgccctacggcagcttgcccgccgccccccttgctgggaccgccct

SEQ ID NO: 2012 - protein, 561 aa, Homo sapiens
MQRHFGALLQLGVNKFSLRMFGSQKAVEREQERVQSAGSWIIHPYSDFRFYWDFTMLLFMVGNLIIIPVGITFFKDETTALWIVFNVVSDTFCLMDLVLNFRTGIVIEDNTEIILDQEKIKKYVRTWFMVDFVSSIPVDYIFLIVEKGIDSEVYKTACALRIVRFTKILSLLRLLRLSRLIRYIHQWEEIFHMTYDLASAVMRFCNLISMMLLLCHWDGCLQFLVAMLQDFPCNCWVSINGMVNHWWSELYSFALFKAMSHMLCIGYGRQAPESMTDIWLTMLSMIVSDTCYAMFIGHATALIQSLDSSRRQYQKYKQVEQYMSFHKLPADFRQKIHDYYEHRYQGKMFDEDSILGELNGPLREEIVNFNCRKLVTSMPLFANADPNFVTAMLTKLKFEVFQPGDYLIREGTIGKMYFIQHGVVSVLAKGNKEMKLFDGSYFGEICLLTRGHRMASVRANTYCRLLSLSVDNFNEVLEEYPMMRRAFETVAIDRLDRIGKKNSILLHKNAIIQEIVKYDGEMVQQAELGQRLGLFPPPPPPQVTSAIATLQQAVVMSFCPQ

SEQ ID NO: 2013 - DNA, 1747 bp, Homo sapiens
  source
  (1)..(1747)
  CDS (201)..(1547)
tcaatttctttatctgtaaaatgcagatactagaacctaactcatcacattattgcaaagcaatgtgtgggaggcacaaggctcaatacaaagaaggagcttggcagtaatagtaatcatgactcttattaccactccagccagagttcagcagcagggaagagcaggtaaatgagaggtgtaaggaaagcacgaagaacatgctatcaggattcatgggtgggaagggggcaggggcggagcatggaaaagcctcaggaggctcctgtttgttcatccttcccttccccttcctcttccctttccgcattccccttcccgtttccttctccccctccctccctcctttctttcttttctttctttctttctttctttctttctttctttctttctttctttctttcttttctttctttctttctgtctctctctctctttctccctccctcgctcccttccctccttccttccttcctctctttctttcttttctttctttctttctttctttctttctttctttctttctttctttctttctccttttctctccctttcttttctttccctctttctttttttctttttctctttcttcctctctctctttctttctttctttctttctttctttctttctttctttctttctttctttctttctttctttctttctttcttttttttctctttcacagggtcttaagggtcttgctctgttgcccaggctggactgcagtggtgagatcatagctcactgcagcctcaacctcccaggctcaaatgatcttcccacctcagcacccccagtagatgggactataggcatgcaccatcacacctggctaatttttgtatttttggtagagacagggtcttgccatgttgcccagggtggtgtcgaactcctaggctcatgcaattctctcaccttgacctcccaaagtactgggattacaggtgtgagccccacacccagcccctttacactgtttatttttctaatgctcttgtttggggacttttacacttattccagaacatgcagtcagcacccagtgactatctgtggaaggagcgaaccaaggaatgatgtctccagctccagtgctccagagtttcagatgtggctctgtttcatccccatcctggctgctctggttcagagaacttgggtggcagactcactgccagcagtggggagcagcccctgccccacacgggcccagcctcaaggtcccggagtaagcacttcttgctccaagccatcttctagagagatgggagacagggaagctaggagcttctaccaccatctgagtcactgtggatggagagagccgctggagagacaggagtgcaagggcctggcgtggctctgcagctctggagacgtgggacaggccacttgcctttcaggggtgctatggcagagcctaccccgttggccttctcagcagtttgccttatgtctaaagcttcctgggcctgcagcacagggtgctagttttgcctatgggggcagccaaccctctaccaattaggttagagttggtggtgtacaacccattcctcagcgggtcagcctgagacatgtcctccccagccttgcagactgtcccgagggggagtgaaatataaagatgacctatttacgaatccatcctttacatgcttgtctttgttcactgtcttgatatcggtgttcccactgtgcctccacggcctcctgcctcctgtgttc

SEQ ID NO: 2014 - protein, 448 aa, Homo sapiens
MLSGFMGGKGAGAEHGKASGGSCLFILPFPFLFPFRIPLPVSFSPSLPPFFLFFLSFFLSFFLSFFLSFFSFFLSVSLSLSPSLAPFPPSFLPLFLSFLSFFLSFFLSFFLSFFLLFSPFLFFPSFFFSFSLSSSLSFFLSFFLSFFLSFFLSFFLSFFLSFFSLSQGLKGLALLPRLDCSGEIIAHCSLNLPGSNDLPTSAPPVDGTIGMHHHTWLIFVFLVETGSCHVAQGGVELLGSCNSLTLTSQSTGITGVSPTPSPFTLFIFLMLLFGDFYTYSRTCSQHPVTICGRSEPRNDVSSSSAPEFQMWLCFIPILAALVQRTWVADSLPAVGSSPCPTRAQPQGPGVSTSCSKPSSREMGDREARSFYHHLSHCGWREPLERQECKGLAWLCSSGDVGQATCLSGVLWQSLPRWPSQQFALCLKLPGPAAQGASFAYGGSQPSTN

SEQ ID NO: 2015 - DNA, 1396 bp, Homo sapiens
  source
  (1)..(1396)
  CDS (201)..(1196)
  modified_base (236)..(335): a, t, c, g, unknown or other
  modified_base (1062)..(1062): a, t, c, g, unknown or other
caccctccctttccctgcaagtccccaaagtccattgtatcattcttatgcctttgcatcctcaaagcttagctcccacttatgagtgagaacataaaatgtttggttttccattcctgaattacttcacttagaataatggtctacagttccatccaggttgccgcaaatgccattagttcactgcaaaattcctttttatggccagtggtagtccacggtgtgtatgtgtatgnnnnnnnnnnnnnnnnnnnnnnnnnnnnnnnnnnnnnnnnnnnnnnnnnnnnnnnnnnnnnnnnnnnnnnnnnnnnnnnnnnnnnnnnnnnnnnnnnnnnttttttagtgatttcgtcatttttcaagtctcaagtggatctttctcgttttccatgattttcagttttcttgccatatttcacgtcctactgtggacatttctaaattttcaacctttttcagtttttttcgccatatttcccgtcctaaagtgtgtatttctcattttccgtgattttcagttttctcgccatattccaggtccttcagtgtgcatttctcatttttcacgttttttagtgatttcgtcatttttcaagtcgtcaagtggatgtttctcattttccatgattttcagttttcttgccatattccacgtcctacagtggacatttctaaattttccacctttttcagttttcctcgccatatttcccgtcctaaagtgtgtatttctcattttccgtgattttcagttttctcgccatattccaggtccttcagtgtgcatttctcattttaaacgttttttagtgatttcgacatttttcaagtcgtcaagtggatgtttctcattttccatgattttcagttttcttgccatattccacgtcttacagtggacatttctaaattttccacctttttcagttttcctcgccatatttcacgtcctaaagtgtgtatttctcattttccgtaattttcagttttctcgccatattccaggtccttcagtgtgcatttctcatttttcacgttttttagtgatttcgtcatttttcnaagtcgtcaagtggatgtttctcattttccatgattttctgttttcttgccatattccacgtcctacagtggacatttctaaattttccacctttttcatttttcctcgccatatttcatgtcctaaagtgtgaattacttattttccgtgattttcagttttctcgccatattccaggttctacagtgtgcatttcccatttttcacgtttttcagtgatttcgtcatttttcaagttgtcaagtggatgtttctcattatcaatgattttctgtcttcttgccatattttacgtcgtacagtggacatttctaaattttccatctttttcag

SEQ ID NO: 2016 - protein, 331 aa, Homo sapiens
  MOD_RES (12)..(45): Variable amino acid
  MOD_RES (288)..(288): Variable amino acid
MASGSPRCVCVXXXXXXXXXXXXXXXXXXXXXXXXXXXXXXXXXXFFSDFVIFQVSSGSFSFSMIFSFLAIFHVLLWTFLNFQPFSVFFAIFPVLKCVFLIFRDFQFSRHIPGPSVCISHFSRFLVISSFFKSSSGCFSFSMIFSFLAIFHVLQWTFLNFPPFSVFLAIFPVLKCVFLIFRDFQFSRHIPGPSVCISHFKRFLVISTFFKSSSGCFSFSMIFSFLAIFHVLQWTFLNFPPFSVFLAIFHVLKCVFLIFRNFQFSRHIPGPSVCISHFSRFLVISSFFXVVKWMFLIFHDFLFSCHIPRPTVDISKFSTFFIFPRHISCPKV

SEQ ID NO: 2017 - DNA, 1114 bp, Homo sapiens
  source
  (1)..(1114)
  CDS (201)..(914)
aaatttgcagagtaattgttcaggtctctatcttcattttaggtgtgtgacttttgtcatggattccttgctggtctcagtggctttagaattgtaagctggaggaggcctgagaagcatttttattcaaaacttgattcttctggggtggtatatacatatatttgtatgcatatacatatatatacacgtacatttgtatgtatatacatatatgtatatttgtatgtatatacaaatatatacatatatgtatatgtgtatgtatatacaaatatatacatatatgtgtatgtatatacaaatatatacatatatgtgtatgtatatacaaatatatacatatatgtgtatgtatatacaaatatatacatatatgtgtatgtatatacaaatatatacatatatgtgtatgtatatacaaatatatacatatatgtgtatgtatatacaaatatatacatatatgtgtatgtatatacaaatatatacatatatgtgtatgtatatacaaatatatacatatatgtgtatgtatatacaaatatatacatatatgtgtatgtatatacaaatatatacatatatgtgtatgtatatacaaatatatacatatatgtgtatgtatatacaaatatatacatatatgtgtatgtatatacaaatatatacatatatgtgtatgtatatacaaatatatacatatatgtgtatgtatatacaaatatatacatatatgtgtatgtatatacaaatatatacatatatgtgtatgtatatacaaatatatacatatatgtgtatgtatatacaaatatatacatatatgtgtatgtatatacaaatatatacatatatgtgtatgtatatacaaatatacatacaaatgtacaaaaatgtacatatatttgtaggtatatttgtgtgtgtccatatatttgtttgtattccctctctatattcatatggtatgcctgtataatttgggggggttgtatgcatatgcatatatttgggggtgcaggtctcgtttccttagtaaatacagtagaggctacttaggtttgtggagcatggtgtgcgtaggggcagtgcttttaactcccttcaacct

SEQ ID NO: 2018 - protein, 237 aa, Homo sapiens
MYIHICIFVCIYKYIHICICVCIYKYIHICVCIYKYIHICVCIYKYIHICVCIYKYIHICVCIYKYIHICVCIYKYIHICVCIYKYIHICVCIYKYIHICVCIYKYIHICVCIYKYIHICVCIYKYIHICVCIYKYIHICVCIYKYIHICVCIYKYIHICVCIYKYIHICVCIYKYIHICVCIYKYIHICVCIYKYIHICVCIYKYIHICVCIYKYIHICVCIYKYTYKCTKMYIYL

SEQ ID NO: 2019 - DNA, 1297 bp, Homo sapiens
  source
  (1)..(1297)
  CDS (201)..(1097)
atgtgtgtatgcatgcatgagtgcatgtgtgcatgcatgtatgcacgtatgtatgcacttatgtacgtatctgcacgtatgcgtgcatgtatgtacgtatctgcacgtatgcgtgcatgtatgcacgtatgtatgcatgtatgtgggcatgtatgtatacatgcatgtaggcatgtatgtatacatgcatgtaggcatgtatgcgtgtatgtatgcctccatgtatgcatgtgtgtatacatgtatgtatgtatgcatgtgtatgcatgtgtgtatgcatgtgtatgcatgtatgtatgtatgcaggtgtgtatccatgtgtttatactagtatgtatgcatgtatgcatgtatacgtgtatgtatgcatgtatgcatgtatacgtgtatgtatgcatgtatgcatgtatacgtgtatgtatgcatgtatgcatgtatacgtgtatgtatgcatgtatgcatgtatacgtgtatgtatgcatgtatgcatgtatacgtgtatgtatgcatgtacgtatacatgtgcatgcctgtgtacatgtatgtatacatgtgtgcatgcatgtatgtatgtgtgtatgcatgtgtgtatgcatgcatgtatgcatgcatgtatgtgtgcatgcatgtgtgtatacatgtgtgtatacgtgtctgtgtacatgtatgtatgtatgcacgtgtgtatgtatacatgtaagtatacatgtgtgtatatgtatgtgtgtatttatacgtgtataaacacatatatacatacatatatacgtatataccatatactacatatactatatactacatatactgtatatactatatactacatatactatatatcctatatactatatactacatatactatatatcctatatactacatatactatatatactatatactatatatcctatataggatatactatactatactacactgtatactatatactatactatatatactatatactataaactatatatactatatatactgtatactatatactatatatacgatatatactatatatactatatatactataatatgtatgtactacatatactttatatatactgtatagtatgtgtatactttatatatactgtagagtatgtgtatactttatatatactgtgtacagtatgtgtatactttatatatactgtgtacagtatgtgtatcctttatatatactgtgtacagtatgtgtatactatatactatatatactgtgtacagtatgtgtatactatatactatatatactgtgtacagtatgtg

SEQ ID NO: 2020 - protein, 298 aa, Homo sapiens [sequence omitted]

SEQ ID NO: 2021 - DNA, 1747 bp, Homo sapiens
  source
  (1)..(1747)
  CDS (201)..(1547)
tcaatttctttatctgtaaaatgcagatactagaacctaactcatcacattattgcaaagcaatgtgtgggaggcacaaggctcaatacaaagaaggagcttggcagtaatagtaatcatgactcttattaccactccagccagagttcagcagcagggaagagcaggtaaatgagaggtgtaaggaaagcacgaagaacatgctatcaggattcatgggtgggaagggggcaggggcggagcatggaaaagcctcaggaggctcctgtttgttcatccttcccttccccttccccttccccttccccttccccttcccctttcccttctccccctccctccctcctttctttcttttctttctttctttctttctttctttctttctttctttctttctttctttcttttctttctttctttctgtctctctctctctttctccctccctcgctcccttccctccttccttccttcctctctttctttcttttctttctttctttctttctttctttctttctttctttctttctttctttctccttttctctccctttcttttctttccctctttctttttttctttttctctttcttcctctctctctttctttctttctttctttctttctttctttctttctttctttctttctttctttctttctttctttctttcttttttttctctttcacagggtcttaagggtcttgctctgttgcccaggctggactgcagtggtgagatcatagctcactgcagcctcaacctcccaggctcaaatgatcttcccacctcagcacccccagtagatgggactataggcatgcaccatcacacctggctaatttttgtatttttggtagagacagggtcttgccatgttgcccagggtggtgtcgaactcctaggctcatgcaattctctcaccttgacctcccaaagtactgggattacaggtgtgagccccacacccagcccctttacactgtttatttttctaatgctcttgtttggggacttttacacttattccagaacatgcagtcagcacccagtgactatctgtggaaggagcgaaccaaggaatgatgtctccagctccagtgctccagagtttcagatgtggctctgtttcatccccatcctggctgctctggttcagagaacttgggtggcagactcactgccagcagtggggagcagcccctgccccacacgggcccagcctcaaggtcccggagtaagcacttcttgctccaagccatcttctagagagatgggagacagggaagctaggagcttctaccaccatctgagtcactgtggatggagagagccgctggagagacaggagtgcaagggcctggcgtggctctgcagctctggagacgtgggacaggccacttgcctttcaggggtgctatggcagagcctaccccgttggccttctcagcagtttgccttatgtctaaagcttcctgggcctgcagcacagggtgctagttttgcctatgggggcagccaaccctctaccaattaggttagagttggtggtgtacaacccattcctcagcgggtcagcctgagacatgtcctccccagccttgcagactgtcccgagggggagtgaaatataaagatgacctatttacgaatccatcctttacatgcttgtctttgttcactgtcttgatatcggtgttcccactgtgcctccacggcctcctgcctcctgtgttc

SEQ ID NO: 2022 - protein, 448 aa, Homo sapiens
MLSGFMGGKGAGAEHGKASGGSCLFILPFPFPFPFPFPFPFPFSPSLPPFFLFFLSFFLSFFLSFFLSFFSFFLSVSLSLSPSLAPFPPSFLPLFLSFLSFFLSFFLSFFLSFFLLFSPFLFFPSFFFSFSLSSSLSFFLSFFLSFFLSFFLSFFLSFFLSFFSLSQGLKGLALLPRLDCSGEIIAHCSLNLPGSNDLPTSAPPVDGTIGMHHHTWLIFVFLVETGSCHVAQGGVELLGSCNSLTLTSQSTGITGVSPTPSPFTLFIFLMLLFGDFYTYSRTCSQHPVTICGRSEPRNDVSSSSAPEFQMWLCFIPILAALVQRTWVADSLPAVGSSPCPTRAQPQGPGVSTSCSKPSSREMGDREARSFYHHLSHCGWREPLERQECKGLAWLCSSGDVGQATCLSGVLWQSLPRWPSQQFALCLKLPGPAAQGASFAYGGSQPSTN

SEQ ID NO: 2023 - DNA, 1672 bp, Homo sapiens
  source
  (1)..(1672)
  CDS (201)..(1472)
  modified_base (208)..(307): a, t, c, g, unknown or other
ggttacaatgttcatatactatatgtgaggtggcacaatattatttgaaagtaaactgtggtaaattaaagatgtacaggcataccttgttttatagctttgttttatcatgctttgcagacactgtgttctttacaaattgaaggtttgtggcaaaacggcatcaagaaagtccatcagtgaagcctttttccaacagcatgtactnnnnnnnnnnnnnnnnnnnnnnnnnnnnnnnnnnnnnnnnnnnnnnnnnnnnnnnnnnnnnnnnnnnnnnnnnnnnnnnnnnnnnnnnnnnnnnnnnnnnatatatgtgtgtatatgcacgtatatacatatatgtgtgtatatgcacgtatatacataagtgtgtgtatatatgcacgtatatacgtatatgtgtgtgtatatatgcacgtatatacgtatatgtgtgtgtatatatgcacgtatatacgtatatgtgtgtgtatatatgcacgtatatacgtatatgtgtgtgtatatatgcacgtatatacgtatatgtgtgtatatatgcaagtatatacgtatatatgtgtgtgtatatatgcacgtatatacgtatatatgtgtgtatatatgcacgtatatacgtatatgtgtgtatatatgcacatatatgtgtgtgtatatgcacatgtatgtgtgtctatatgcacatgtatacgtgtgtgtctatatgcacatgtatacgtgtgtgtctatatgcacatgtatacgtgtgtgtctatatacacatgtatacgtgtgtatatacacatatatacgtgtgtgtatatacacatatatgtgtgtgtatatacacatatgtgtgtatatacatatatatgtgtgtatatacacatatgtgtgtatatacacatatatacatatatgtgtatatacacatatatacatatatgtgtatatacacatatatacatgtgtgtgtatatacacatatatgtgtgtgtatatacacatatatgtgtgtgtatatacacatatatgtgtgtgtatatacacatatatgtgtgtgtatatacacatatatgtgtgtatatacacatatatgtgtgtgtatatacacatatatacatatatctatgtgtgtatatatacacatatatacatgtctgtgtgtgtatatatatacatatatgtgtatatatacacatacatatatgtgtgtgtatatatgtacacatatacgtatatacatgtgtgtatatatgtgtacatatatatgtgtatatatatgtgtatatatatgtgtatatatgtgtatatatatgtgtgtatatatgtgtatatatgtgtgtgtgtatatatatgtgtatatatgtgtgtgtgtgtatatatatatatatatatatatatatatatatatatctcaaagtcacatagctccagagctccacaggggtacaagtatgagtacgttcactgcagtgtttaactacagatagttggagacaaaatgggtgtctattacagagggatgaacagtaaagcatgtgtccatcttggagtattatgcagcagttagcaggagtggactagatatatacatggaaatatgggtagatatttggtcttagtccttttgggcttctataacaaaacgctataaataggatggctaatatagaacagaaatttatttctt

SEQ ID NO: 2024 - protein, 423 aa, Homo sapiens
  MOD_RES (3)..(36): Variable amino acid
MYXXXXXXXXXXXXXXXXXXXXXXXXXXXXXXXXXXYMCVYARIYIYVCICTYIHKCVYICTYIRICVCIYARIYVYVCVYMHVYTYMCVYICTYIRICVCIYARIYVYVCIYASIYVYMCVYICTYIRIYVCIYARIYVYVCIYAHICVCICTCMCVYMHMYTCVSICTCIRVCLYAHVYVCVYIHMYTCVYTHIYVCVYTHICVCIYTYVCIYIYMCVYTHMCVYTHIYIYVYIHIYTYMCIYTYIHVCVYTHICVCIYTYMCVYIHIYVCVYTHICVCIYTYMCVYTHICVCIYTYIHISMCVYIHIYTCLCVYIYTYMCIYTHTYMCVYICTHIRIYMCVYMCTYICVYICVYICVYMCIYMCVYMCIYVCVYIYVYICVCVYIYIYIYIYIYISQSHIAPELHRGTSMSTFTAVFNYR

SEQ ID NO: 2025 - DNA, 1990 bp, Homo sapiens
  source
  (1)..(1990)
  CDS (201)..(1790)
ttctgtttatataaattaaaaaactcaagcacttctttttgagtgtagggaacttcctcatgggtcacactctgaacctcacctctgggggcccaccaggactttagttagttataggtctagaaacaaacaggggtgttgggggtggcttctgaggagaatcaacattatctccactggccactgcctcaagagaggccatgactgttgcctcaggaagcacagggtttatctcctcagacaaaggtggaaaggatatatatatacatatatgcatatatacacatacacacacatgtatgcatatatacacatacacacacatgtatgcatatatacacatacacacacgtatgcattatacacatacacacacgtatgcatatatacacatacacacacgtatgcatatatacacatacacacacgtatgcatatatacacatacacacgtatgcatatatacacatacacacacgtatgcatatatacacatatacacacacgtatgcatatatacacatacacacgtatgcatatatacacatatacacacgtatgcatatatacacatatacacacgtatgtatatatacacacatacacacatgtatgtatatacacacatatatacacacgtatacacatatatgtatatacacatgcaaacacatatatgtatatatacacatatatgtatatatacacatgtatacacatatatgtatatatacacatacatacacatatttgtatatatgtatatacacatacatacacatatgtatatatacgtatatacacacatatgtatatatacacatatatacacacatatgtatatatacacatatatacacacatatgtatatatacacatatatacacacatatgtatatatacacatatatacacacatatgtatatatacacatatatacacacatatgtatatatacacatatatacacgtatatgtatatatacacatatatacacatacatacacatatgtatatacacacatatatacacatacatacacatatacgtatatatacacatatacacatacatacacatatacgtatatatacacatatatacacatatgcgtatatacatatatacacatatatacacatatacgtatatatacacatatatacacatatacgtatatatacacatatatacacatatatacacatatatgtatatacacatatatacacatatgtatatatacacatatatacacatatatgtatatatacatatatacacgtatgtatatatacacatatatgtatatatacatatatacacgtatgtatatatacacatatatacacgtatgtatatacatatatacacatatatgtatatatacacatatatacacgtatgtagacacatatatacacatatgtatatatacacatatacacatatgtatatatacacatatacacacatatatgtatatatacacatatacacacatatatgtatatatacacatatacacacatatatgtatatatacacatatacacacatatatgtatatatacacatatacacacatatatgtatatatacacatatacacacatatatgtatatatacacatatacacacatatgtatatatacacatatacacacatatgtatatatacacatatatacacatatgtatatatacacatatatacacatatgtatatatatacatatatacatatatgtatatatacacgatatatttatgttatatatataaactactatatatagtgtatatatagtactactgtataataaactactgtatatatactatatataataaactattttatatatatatagagagagagagagagagagagtagtttattaagtagtattaactcacatgatcatgagatcccacaataggctaccttcaagctgaggagcaaggaagccagtcagagtccc

SEQ ID NO: 2026 - protein, 529 aa, Homo sapiens
MTVASGSTGFISSDKGGKDIYIHICIYTHTHTCMHIYTYTHMYAYIHIHTRMHYTHTHTYAYIHIHTRMHIYTYTHVCIYTHTHVCIYTHTHTYAYIHIYTHVCIYTHTHVCIYTHIHTYAYIHIYTRMYIYTHTHMYVYTHIYTHVYTYMYIHMQTHICIYTHICIYTHVYTYMYIYTYIHIFVYMYIHIHTHMYIYVYTHICIYTHIYTHMYIYTYIHTYVYIHIYTHICIYTHIYTHMYIYTYIHTYVYIHIYTRICIYTHIYTYIHICIYTHIYTYIHIYVYIHIYTYIHIYVYIHIYTHMRIYIYTHIYTYTYIYTYIHIYVYIHIYTHIYTYMYIHIYTHMYIYTYIHIYVYIHIYTYVYIHIYVYIHIYTYVYIHIYTRMYIHIYTYMYIYTYIHVCRHIYTHMYIYTYTHMYIYTYTHIYVYIHIYTHICIYTHIHTYMYIYTYTHIYVYIHIYTHICIYTHIHTYMYIYTYTHICIYTHIHTYVYIHIYTHMYIYTYIHICIYIHIYIYVYIHDIFMLYI

SEQ ID NO: 2027 - DNA, 1309 bp, Homo sapiens
  source
  (1)..(1309)
  CDS (201)..(1109)
atgtataagcatatatgtatatataagtatgtatgtatacatatatgtatatatgcatatatgtgtgtatatacatatatgcatatatgcgtatacatatatgcatatgtgtgtatatacacatatgtacatatatgtatatgtgtatatatacatatatgtatatataggtatatgtgcatatatacatacatgcatatatgtatgtatatgtacatatatgtatatgtgtatgtacatatatgtacatatgtgtatgtacatatatgtacatatgtgtatgtacatatatgtacatatacatagatgtacttatgaatatatgcacatatgcacatgtatgtatatatgcgtatatacatatatgcacatatgtatatatgcgtatatacatatatgcacatatgtatatatgcgtatatacatatatgcacatatgtatatatgcgtatatacatatatgcacatatgtatatatgcgtatatacacatatacgtatgcgtatatacatatatgcacatatgcgtatatacatagatgtacatatgtatatacgtatatatgtacatatgtatatatgtacatatgtatatgtgtacatgtacacacgtgtatatgtgcatacacacacatgtacacacgtgcatatgtgcatacacacacatgtacacacgtgcatatgtgcatacacacacatgtacacatgtgtatatgtgcatatacacacacatgtacacgtgtatatgcatatacacacacatgtacacacgtgtatatgtgcatatacacacgtgtacacatgtgtatatgtgcatatacacacaatgtacacgtgtatatgtgcatatacacacaatgtacacatgtgtatatgtgcatatatacacacatgtacgtgtgtgcatatatacacacatgcgcacatgtacacatgcacacatgcacacatgtacacatgtgcacatgcacatatgtacacatgtgtatatgcatatatacatatatgtatatatgtacatatgtacgttatatatacatatatgtacatatgtatatatgcgtatatatggatgcatatatacatataagcatatatgcctatatatagatatatgtatagtcttataacttgaggattgcttgaggtctctacatatatcgtatagatatatgctatacatatacatatacacacacacacacacacacacacatatatatgtagagagagagacagagacttggcttgtctcccatgctggagtgcaatggcatgatgacacctcactgcagccttgacctcctggg

SEQ ID NO: 2028 - protein, 302 aa, Homo sapiens
MYVYVHICICVCTYMYICVCTYMYICVCTYMYIYIDVLMNICTYAHVCIYAYIHICTYVYMRIYIYAHMYICVYTYMHICIYAYIHICTYVYMRIYTYTYAYIHICTYAYIHRCTYVYTYICTYVYMYICICVHVHTCICAYTHMYTRAYVHTHTCTHVHMCIHTHVHMCICAYTHTCTRVYAYTHTCTHVYMCIYTRVHMCICAYTHNVHVYMCIYTQCTHVYMCIYTHMYVCAYIHTCAHVHMHTCTHVHMCTCTYVHMCICIYTYMYICTYVRYIYIYVHMYICVYMDAYIHISIYAYI

SEQ ID NO: 2029 - DNA, 1276 bp, Homo sapiens
  source
  (1)..(1276)
  CDS (201)..(1076)
aatgattgcacatgcacaatggtgacacgtgcctatagtcctaactacttaggaggctgaggtgggaggatcgcttgagcccaggaggtcaaggctgcagtgaggtgtcatcatgccattgcactccagcatgggagacaagccaagtctctgtctctctctctacatatatatgtgtgtgtgtgtgtgtgtgtgtgtatatgtatatgtatagcatatatctatacgatatatgtagagacctcaagcaatcctcaagttataagactatacatatatctatatataggcatatatgcttatatgtatatatgcatccatatatacgcatatatacatatgtacatatatgtatatataacgtacatatgtacatatatacatatatgtatatatgcatatacacatgtgtacatatgtgcatgtgcacatgtgtacatgtgtgcatgtgtgcatgtgtacatgtgcgcatgtgtgtatatatgcacacacgtacatgtgtgtatatatgcacatatacacatgtgtacattgtgtgtatatgcacatatacacgtgtacattgtgtgtatatgcacatatacacatgtgtacacgtgtgtatatgcacatatacacgtgtgtacatgtgtgtgtatatgcatatacacgtgtacatgtgtgtgtatatgcacatatacacatgtgtacatgtgtgtgtatgcacatatgcacgtgtgtacatgtgtgtgtatgcacatatgcacgtgtgtacatgtgtgtgtatgcacatatacacgtgtgtacatgtacacatatacatatgtacatatatacatatgtacatatatacgtatatacatatgtacatctatgtatatacgcatatgtgcatatatgtatatacgcatacgtatatgtgtatatacgcatatatacatatgtgcatatatgtatatacgcatatatacatatgtgcatatatgtatatacgcatatatacatatgtgcatatatgtatatacgcatatatacatatgtgcatatatgtatatacgcatatatacatacatgtgcatatgtgcatatattcataagtacatctatgtatatgtacatatatgtacatacacatatgtacatatatgtacatacacatatgtacatatatgtacatacacatatacatatatgtacatatacatacatatatgcatgtatgtatatatgcacatatacctatatatacatatatgtatatatacacatatacatatatgtacatatgtgtatatac

SEQ ID NO: 2030 - protein, 291 aa, Homo sapiens
MYMYSIYLYDICRDLKQSSSYKTIHISIYRHICLYVYMHPYIRIYTYVHICIYNVHMYIYTYMYICIYTCVHMCMCTCVHVCMCACVHVRMCVYMHTRTCVYICTYTHVYIVCICTYTRVHCVYMHIYTCVHVCICTYTRVYMCVYMHIHVYMCVYMHIYTCVHVCVCTYARVYMCVYAHMHVCTCVCMHIYTCVHVHIYICTYIHMYIYTYIHMYIYVYTHMCIYVYTHTYMCIYAYIHMCIYVYTHIYICAYMYIRIYTYVHICIYAYIHMCIYVYTHIYIHVHMCIYS

SEQ ID NO: 2031 - DNA, 1312 bp, Homo sapiens
  source
  (1)..(1312)
  CDS (201)..(1112)
  modified_base (925)..(1024): a, t, c, g, unknown or other
cggggattcaccatgttggtcaggctgatctctaactcctgacctcaagtgatccacctgcctcggcctcccaagtggtgggattacaggcatgagcctctgtgcctggcttgggttacattcttgatcttcaaggtcaaactttcatcaaggagattatgaagtatgtgagggattttctgcagtgaggaacggtccagatgattgatttattttttttcttttatctcgggttgttggtttattctgcgaggtcggcttcctcccctttttctataccccatttctgcttctgcgccctcacaattccttctcccccccccccctttttgtttttttatttcatcctctccctttcttttctaccctttttattttttctgcggttcgtatttatttttttgatctctcgttttccctctttcttcttctctttcctcattttttttctttcttttttttttttctttttttaccttatccccctttccccatttccctcatcctttcattctctcccatttttttcctcttcctgttttcttctcttctcttttttctctcctttttttcccccagtttatctcattttcccttatattaatatcctcaatacgcctccttttttccttttttttctcctcccccttttcttattcccaagttctgtatttccctttcccttccctcccacccgttttttttacttccacgccgcgtctctttttttttttttccctcccccgattattttacctctttctgatttttgttcgcttactccttccgtctttatcatcattttctatctccctctttttatatttttgtctcccccttttctctcactccttcctttttcatttcccttatgctctccccttgtttttttatccatttctatctccgcctctgtctccttccnnnnnnnnnnnnnnnnnnnnnnnnnnnnnnnnnnnnnnnnnnnnnnnnnnnnnnnnnnnnnnnnnnnnnnnnnnnnnnnnnnnnnnnnnnnnnnnnnnnncaacaaaaaacataataaatcaggtagcatacagtatttactatttttgcaaaataaattaccatttctttgtttgacaagaaggtaattataatttcaagtgactggaagtgagaaaaacacaggttaccaagaaaaagagacctttgttttagcccaaaattacattcattcttagcagaagcttgcactgccagttttgtgtatagcccacaaacattcttttatttaaaagtagtcttagtgggttggaagataagtacagaactctgctaaataagccaggaa

SEQ ID NO: 2032 - protein, 303 aa, Homo sapiens
  MOD_RES (242)..(275): Variable amino acid
MIDLFFFFYLGLLVYSARSASSPFSIPHFCFCALTIPSPPPPFLFFYFILSLSFLPFLFFLRFVFIFLISRFPSFFFSFLIFFLSFFFFFFYLIPLSPFPSSFHSLPFFSSSCFLLFSFFSPFFPPVYLIFPYINILNTPPFFLFFLLPLFLFPSSVFPFPFPPTRFFYFHAASLFFFFPPPIILPLSDFCSLTPSVFIIIFYLPLFIFLSPPFLSLLPFSFPLCSPLVFLSISISASVSFXXXXXXXXXXXXXXXXXXXXXXXXXXXXXXXXXXNKKHNKSGSIQYLLFLQNKLPFLCLTRR

SEQ ID NO: 2033 - DNA, 12857 bp, Homo sapiens
  source
  (1)..(12857)
  CDS (201)..(340)
  CDS (11958)..(12657)
cagaatgaaactctgtctcaaaataaataaataaataaataaataaataaataaataaataaataaaacaaaatcagataaaaataaaacaaaattgcagctggattaaaaaggccccagtaagtcaggaaccagggagagagatactgagggggcagcttgctttcaatgatggtcctgcctcaaaagcacacctaccaatgtgccaccccttatctgtcacaccctgtcacctgcagggtgttaggcaaagtgcctcagcaaacgccagcccgtgctgtttgctctggctgtgccctttccttctggcgttccccagccatttcatcctcaattcccagtgagaaccctggacattttgcagcctggggactaaattctaacaggagggtcaatcatagcaatgatgatgatgatgatgaccacgatgatctaatagctaatacttacacagtacacactatgtgccagggagctgttagcagagtttgcataactcagtctcgccacaacccaagaaagcaggcgctactgttatttccatcttatggatggggtaagttgaggcccagactggttatgtcacttgcacaagttacataactggaatctgaaaccagatcacctggctccaaaacctgggctctcaaccaccatcagccatgagccacatcatctgatgacattattccagacccgtatcaacccccaacccttcctgcaggaagatatttcatttgggtccaaaaatacttgcccaatgcctgctccacgccagcccccgcattaggcaaaaacgtggattgtaacggaacaggcaaaacctttgtcctagtagagtcacgctctccccgcctctgcagcactcaggtgagctgcactgtggtttcacaggcccatgcaggtgtgtgtatagctgcaggttttatttccctagcctcacagcctcaagaggagagataaaatgtgtatattcagggatggaaaacacacacacattttctctctcccatcaaggctgtgaggctacggaaataaaacctgctaagaataaatatacggagaagaaaaaacaaagccttggagtcaggccagagtctgagtcccagctctgctgcttggtagctgtgtgaccttgggcaagtcactttgtctctctgtgccttagtttcctcatctgttaagtgggaacaatcagaatacagatactaggaatttaatttttaagttttgggggaggcataacgtcactttactcttctgcttctgcccatgacagaaggaaactgacatttactgagcacctacagtatgcaagactagctgccaggggctttctacatgctcctcatttaatcctgaaaacaaaccctccactgtggcacctgggggtacaatggtgatttaatgaaacctctgtccccaggggtccccattgttcactgccctctcttaggactcaggcataaaatttatccccaatctgtagatgatgaaactgaggctcagaacggttcatgtaaattcactgaaaccaggcattcaggtaatagaggaggagaggttcaagctccaaagccagtatctcctggtatcgctgacatagagtaggcactgataactgcccctcggagactacacggcaacaaagacctatgtacatccatagaaggctctgcagaggatctggtacttcatattgtcacaagagaagtttctggggagccctgcaggcagagaaggagggagatgcttagaatagattcaaacacagcccaggttttttggagaggagcacaacttgttatctctagagggtaactgaaatcagccagtcatgaggagtgcagggagggtgctattacctccacctttacaacatcacctcttccactaccagtgacccagtttgcccttgagaaatcactccgtccacaactttctgtctccggtttctaaagggatgactctacccattataggaccaaagctggagtcatagtaatggaagcggagattgtcatatgacccaacctgagccaatgagaattaggcttgggactttcattgtaactaccaggaaaaagtctttttctgcttcagtttctaaaccagtgggatacaggacagtagctcctaggagctatctttgccacaacataaaaagggcctgcctgtggatggaaccatcacagagggaagcagagccaagagctgaagaaacagagattcccgtcttgagcatctgagcctgaagccactatgactctaagcttctgttatgccaacaattttttttacctgaaccagtctgaagtgggtttctatcacttgcagaaagagttctgatttcttttttttttttttttacacagagcctcgctctgtcgcccaggctggagggcagtggcgcgatctcggctcactgcaagctccacctcccaggttcacgccattctcctgcctcagcctcccgagtagctgggactacaggtgcccgccaccacgcctggctaatgttttgtatttttagtagagacggggtttcaccgtgttagccaggatagtctcgatctctgaccttatgatctgcctgcctcggcctcccaaagtgctgggattacaggcatgagccactgcacccggccgaaagagttctgatttctaaagtgacccagctgaaccaagagccaaactgggattcagtatctggctgtttgctaagtaggtgatgcctcaaggattctccctgcatgggaatttgtggcaacttttttggctgaaagaggcaagaggagtaaggtaccagcattgctggataaatccaggactgctgaagggagtgttgtacgctcttgcaatgaacagaatggaagaatatcggcatatttattctcagcacatcccaaaggacatccagaaaaatccagggagactggggtgggggaaacatagccgaagtcctctagttagacatgtgaactccaaatatgagagacaggtctcagttaatttagaaagtttattttgccaaggttgaggatgtgcgcccacggtaccgcctcaggaggctctgacgacatgtgcccacggtggtcagagcagtttggttttatacattttagggagatatgagacaccaatcaccgatcaatgtatgtaagatgagcattggtactgttcagaaaggcaagacaacttgaagtggggaggaggcttccaggtcataggtagataagagacaaacagttgcattcttttgagtttctgatgagcgtctccaaagggggcaatcagatatgcatttatctcagtgagcagaggggagactttcaataaaatgggaggcaggtttgccttaagctgttcccagcttgacttttccctttagcttagtggtttggggccctgagatttactttccttttacaggcacatggaggcattgaatactgaagtgtcccactttgtgccctcaggttggtgaggcttacagttgctcaggttacatgagaatagggtcacataaacagctgtcccactgtgggcttggttttctgcaaggtactgagttccccattatgccaggtgtgtaagcagacgctgtaacaggagagagggcagtaagttatggcagcattttttttcttttttcttttctttcttttttttctttttgagatggagttttgctgttgttgcccaggctgaagtgcaatggcgtgaccttggctcaccacaacctccgcctcccaggttcaagcgattctcctgcctcagcctcccgagtagctggtattacaggcatgcgccaccacacccagctaattttgtaggttacagcagcatttctcactggtccatggaccatcagcctaacagttacttgcagttgctccaacatgtgtattcctgggccctgcacagacttaatcagaacttctgtgaagtagtctaggagctggcatgttttgctacctagcccaggggattctgatgcacaataagagaatatccggtaacattagcacttctcaatcttaaaagtacacacatggtcttgggactacgttaaacacaaattctgattcagaaggtttggtataagagactgaccatctgcccggtgctgatgctggttcacaggccacagtctgaggagccaggagcttagatgatgacttcaacaatgtaatgccagccctcacaccgtacactcctatggctgaagactggaccacacactggtacagaagaccagcaaggacaatagggttccattctaccaggcaaggccaggaggaaacaaaaccagtctcatgaactggctgaatagttccaaagagacaaaagctctatgggcaaagagagagatgcgcctgagatttaagtttacatgataaaatggtaactgttatttactgaacagtactgtgtgcaggtggcatattctggccactttaaaccattatctgagctggcatttaccatagccatataaagtaagcaccagaatctccactgtgtggaggagcaaactgagatgaatgtggttgacattaaataatatttgagattattctgccttctaggctcatggtagggctgcacttcctggctccttgtggatggggccaatgagctgtgggtgggtatgacatgctaattttgggtggggcccttttattgtgggttcaagcccctccaatgctacctttccctgtcactgtgactggcaacattcaaatgatggctgctccaacagctggaccctttggtgtggaaaaaacagagcctcaccatttgacctatgagagacacacagcatgcatgataaataaaatttgttgtaaaaagctgagttttaggactgtttgttactgcaccatataaccttgtatagcctgactaatacacataagtttcaacagctaggatttcacaaggccaggatttaacctagatctggttgactccatagtctatgttcactcaattcaatgtagggaaagatactggcatccacaaatctcagccgaaccactctgtcaacagaatgagaaggacgatttccaggagctgggctgacataggaatgagaggttactcatggagacatccatcagatcctgggggactgtggtgagtagaacaagagccctggtcaagcctatgtgggtcacagaaacctcatcccagagcaagcagctcatccccaggccagcacagggatagggaaagaccctggaggtgacagcagaaaacagcagccccaattatagtctgacccaggctattgagcccacctgacccaatgaaagccaccaccaaaatctgggggctccaacagataggcagaactgatgacaactgaagagagaggaagagaacagagagagacaacagccaagaaaacaggccctatcccagagcaggccaagcctcaccatgttgtcacttagtcatgctcaaaggatgctacaggaaggaaggggcacctgctgggtgcttctgtagaagaggcaggcctcatggggtacgatgaaagggagcctgactcaacagatgaggcagggcacccatgggcaagagacccagtggagccgctgctaatgaaagaaaagggtacttgcactatccatggttctgaggctaaagctgctccaccaagtgggtctcaaacatattagtgacaatagctgtcgctttgtactgagtgcaggtaccatcattatacccttttccagattaggaagctgagacatggagagtttaaacaacacgcccaaggccacccaactaacaagtggtggagccaagatcccagctcaggggatttgactcttcttctgagactgagtcttgctccgttgtccaggctggaatgcagtggtgcaatcatggctcactgcagccttgacctcccaggatcaagcaatcctccctccccagtctcctgagtagctgggactacaagtgtgcatcaccacacccagctattttttctgtatttttttgtaaagacagggtttcactgtgttgcccaagctggtctcaaactcttgggctgaagtgatcctcctgctttgacctcacaaagcactgggattacagcgtgagccactgagcctggctcagggatgcgactctgatcttactcttcctccctcagctgttttcccataggctcttgtggctacacaacatctgctctgtcctcaagtggggtgattctgtcgatgtctggagagactttggtttgccatgccttgtggattaactaggtgctactggtgtctagtaggtggaggtcagggaggcttctaaacactctataatacaccagacagccctcaacacaaggaatgatttggcctcaaatgtcaacagtgctgaggctgagaaaaccaatgttagaccagcactatccaacagaaatacaatcaagtggtcaaggcccggtagctcacatctgtaatcccagaactttgggacgccaaggcagggggattgcttgagcccaggagtttgagtttagcctgagtaacacaacaagaccttctacaagaaatcaaaaaattagctgggcatggttacacatgctgtggtcccaagtacccaggatgctgaggtgggaggatcgattgagcccaggaggtcaaggctgcagtgagccatgatctcaccactgcactccagcctgggcaccgaggccacactacccataggctgctcccagccagaagcgagcatgctaggtaatagtgccacctgttcctgcaggcaagagagtcctctaatagtcaacagtccaccagagactcccaactgatctggccaaatgttcctagagctgtgtgttgtgtctcagactcctcctgcccaacttcttccttcacctctccccttcatcagctggcttactgttcacttcaaggtcaagacattggctgtctgatgcagggacatccctggcacggcctccatggtcatctagcaaggggagggtggagcaaaggcttggtcccatagcatatattcacccatctccttgtccatttgttgtcttccagcagaatgtaagctctgagaaggtaagcagtttcctctcctttcctacaactgctgtcttccttgtatctagcacagtggctggcacaggctaggtgctcagtaaatatctggtgaatgaacccaggtcccctgaattctctgcttcatttcacaaagctgatctgagcacctattaggtctacaagctgtggcaggtattggggataagatctgagcaagacaggacccttgccttcaaggcactgagttctcaaaggcaagatggtagctatacagctaggcacagaattgtgtgactacagactatggccacagagctcctccttgctgacagctggtgggagctggtgttggctttgtttactgagcatccctacaaagggatttggggcttatgtaatctgaactcaaccagaaggtcagagaaggcttcagaccaaagtttaagataaagaggctgaggcaaggctccagtcccagagcatccccaggaggcctaccctgttcttccatgaatgtctcttgattagaaactctagagtctaggaggtcaaggtgggaggatcacttgaagccaggagttcaagaccagcctggacaacaaagcaagacctcatctctataaaaaataaaaattaaaaataactaaaaataaaatgagagacagagagagagagagagagagagagagagaacagaccagcctaggcaacatggtgaaaccctgtctctacaaaacatacaaaaattagctgggtgtggtggtgtgcacctgtggtcccagctactcgggaggctgaggtgggagagtcacttgagcctgtgaggcagaggttgcagtgagcagggatcgtaccactgcactccaagtctaggtgacagagcaagaccctgtctcaaaagagagagagagagattgtgagaaacagcagagtctgactggagctgaattattgagctcagcctgggaccaactgtcccacccactgaccagcactgaggacagagggtaaaccctgcaaaggaagtgatcagcttagagaacatttttcatcactccaagacctgatgttaaccacactgaggcttcacattacacagaacacaatgacaatgttctggttatgtttcttgaaaagagtttttttttttttagagatacacattaaaatatttacagatgaaatcatataatgtctgcacgttgcttcagaataatattacaggggagaagggataggctgattcaggccattagggcctggtgaaggtacccgagttctgtctatctttaggttaaaactttttcatcataaaaggtttcctgaaaaaagcaagaaaatgtaaaaatatatatatatagattacatgtggacttggagcagccaacaccattgcttcctgtccccaccagcagccaagactcctcaagctgaaatactggggtcggccacacctttgcaccacagcttcctttgttcttcctgaagtctttcctaattgtgctggaatgcaggcattgcagcagggaatcccctgttccaaagcctttgctggattttttttttttgaggcggagtctcgctttgtcgcccaggctggagtgcagtggcgccatctcggctcactgcgagctccgcctcctgggttctcgccattctcctgcctcagcctcctgagtagctgagcctacaggcgcccgccaccacgcccggctaatttttttgtatttttagtagagacggggttttaccgtgttagccaggatggtctcgatctcctgacctcgtgatccgcccaccttggcctcccaaagtgctgggattacaggcgtgagccaccgtgcccggccactggatcttataaatcacaggatttcagaggagatgcggccctggatcagatactaacatcttatgtcttcccttgagtgctgggaaaggggaggttggagactggggaacattttgccatttgcagtcttaggagatctttgtaaagatttctccctctggctggttttgaccaggatattgccaaattccacgtcttggtttctggatcctcccgagcctttgagtttcccgtgaggccacagctgtagggaggctgagccaagtggccataacaaccaggcagagtagcaggaagaagcaggggcagggtacaagcctccccctcaggaggggaacttccctgtgccaaggggaatgaagggacccaggagatgcacagcagacccagtgccctacctctttttatagtccaggtcccccacagacccctttatcagctggcttactgttcactccaaggtcacgacagtggctgtctgatgcagggacagaaatccctggcacagcctccatgttgtccctctgcagagacaggaggactcaggcctggccatgatgctggagtcaccgtggatataggccctggcccatttgactcaagaacacatacataactggaaccaagaggctggcgaatcctctcaagaccctggccacttggaagaccctaagcctccttgcaggtggccatactaagcaaagtcacttgcagccacccttccacgatgcgttctacatcacccagctgtgaaaaccacccacccccatccccatccccttcacactcatgccttcctcctgagctcaaggggccctggcccaaggttcctttagaaccaggaaggaggttttgtccctctgaaaatcatccttttcaaacagaaggcatttatcttggccaggcttaaaagacaaaaagatgatagctgagctctagggcccatcccacagacaatatccagaaaccttctccccacaattcccacaccagcctcccagcagctggatcttttctccacgggatttgcctacaagacttctctccggctttatctcaggcgggtttgtcaggggagcaatgtcaccatccctccaccaaattcacctcaacaacatttactgagcaccaagtgtgtccccaccgtggctcagccttcccacgcactgtcctgatttaaccccacgtgcttataacccaagggagaatcactgcgatattttatcaatgtaaagacacacatcttaattgttcatattttcatgcacctgaaatttgggtaggtcttctaattacaactgtgacatggctgtcccgcctggtcccatacagactcagtcacagcagttcatagcattgtcactttaattaagttttgggcatggttgttacttcaaatgtggagtgtaggtgctattttaaatgtcttcaaaaagattcaactgtgattcagctttgaattgaaaagctattgtgcacacaggaagcctgggaacagagcagcagaatgcctgtgcgatgctggcgaggcagacacatattcatccctgcagacaggcccacaagtccagattttcttgcaaagcaccaaccaaatacttaaaaacttaaaatgggacttaaaaaccatcccaggctgggcacagtggctcacaactgtaattccacagctttgggaggccttcaggattactgaagcccaggagttggagaccagcctggacaacatggtgagacccccatctctacaaaaaaaaaaaaaaaaagaaaaaaaagaaaaaacttaaaaattacctggacatggttgtatgtgtctgtagtcccagctactcaggaggctgcggtgggaggatcgtttgagcctgggagttccaggctgcagaaagctacgattgtgccattgcattccagcctgagcaccaatgagatcccatctcaaaaacaaaacaaaacatccccgggatgagtggacacacttgcaagaaatgcctcacttcctgtgcttctcgattaggggccaccaaatgtttcatgcaaagggtgatagggaatatttttggtttgtaagctacacaggctcagctgcaaccactcaactctgccatcagggcctgaaagcagtcatagggttgtaactatgctccaacaaaacttttttttttttttttttttgagacggagtctcgctttgtcacccaggctagagtgcagtggtgcgatctcggctcactgcaacctccgcctcctaggttcacgccattctcctgcctcagcctcccgagtagctgagactacaggtgcccaccaccgcaccaggttaatttttaaaatatttttagtagagacggggtttcactgtgttagctaggctggtcttgatctcctgacctcgtgatctgccggcctcagcctcccaaagtgctgggattacaggcatgagcctccgcgcccagccccaacaaaactttatttgcaaaaacaagtggaggaccacatttggttcatgggtggtagtttgctgtccctttctcttgatagaacagaaaacaatgtggaaaaatgagggcactgatgattttaagtcaaaagtgatacagaagatgaactttgaactaaaaaaaaagttttaagaatatcttacttcaatgatattttatctgtgtgtacttacaaaagtgatgtgtgattaaaaaaccaaacaaggggactgccatcagcaacagccccaaagcccactgggctccttggtgggttgtgagttcagcagcctcagcagggtgcatcagtcgagcacagctaggactccccacaacatgcgtgtcccaggctggcactgagacacagcgctgatgttgctgccgggggctgctgatggcactggtgctggtgctggggtggctgctatgggtgagggggcgtcaaggaagagcacagtagtgtgtagatgtgaaccagggtccccaggtggtcgccctttgaatgggccaatgtccaagacctgtacatgattgtgctctgcatccttgcagccagcctggccaagactggttctacctgtcccacaaggtcaccagcatagtccctgagagcaccctgctcatcatcctgggcctggtgctgggcagcatcatctgggtggccaaacacataacatccttcatgatgatgtccctcatcatgctagatgccagctacttcatccccagctggctcttcttcggcaacctgggcaccatcctgctgtacaaggtcatcagcaccatgtggaatgcatccaccaccatcctgtccctctatgacgtctctcttagtaggctcatgggctacctgcagatagggctgctggacttcctcctgttcggcagcctgatcaccactgtggacccagcagctgtcctggttgtgtttgaggaggttcatggcaatgaggtcctgttcatcatcatcttcagggagttgctactgaatgactctgtcatcatggttctgtacaatgtgtttcaatcttttgtgacactgggtggtgacaacgtgaccagcatgaactctgtggaaggtgtagtctccttccttgtggtgagcctggggggcatgctggtgggaatggtctttgcctttctgttgtcactggtgacccacctcaccaagcatgtgcacatcatcgagcctggtttcatgttggtcatctcctacctgtccattctgatgtctgagaagctgttgctgtaggccatcctggccatcatcttctgtggcatctgctgccataagtacatgaaggccaacatctcagagcagttggcccccaccatgtgctacaccatgaagatgctgaccagtggcaccaatcccatcttcatgtccctgggcaccttagccatgaacctgctcatctggacgtggaacaaggcattcatccgcctgcactg

SEQ ID NO: 2034 - protein, 279 aa, Homo sapiens
MCHPLSVTPCHLQGVRQSASANASPCCLLWLCPFLLAFPSHFILNSHQPGQDWFYLSHKVTSIVPESTLLIILGLVLGSIIWVAKHITSFMMMSLIMLDASYFIPSWLFFGNLGTILLYKVISTMWNASTTILSLYDVSLSRLMGYLQIGLLDFLLFGSLITTVDPAAVLVVFEEVHGNEVLFIIIFRELLLNDSVIMVLYNVFQSFVTLGGDNVTSMNSVEGVVSFLVVSLGGMLVGMVFAFLLSLVTHLTKHVHIIEPGFMLVISYLSILMSEKLLL

SEQ ID NO: 2035 - DNA, 4501 bp, Homo sapiens
  source
  (1)..(4501)
  CDS (201)..(392)
  CDS (899)..(1180)
  CDS (1571)..(1763)
  CDS (1811)..(2016)
  CDS (2094)..(2265)
  CDS (2556)..(2787)
  CDS (2895)..(3033)
  CDS (3110)..(3347)
  CDS (3602)..(3904)
  CDS (4045)..(4301)
  modified_base (2859)..(2859): a, t, c, g, unknown or other
gaatggttaacccaggcatctccagcagccaatcacagagctctgcaggaatacctgggagaggtcctcatgcagcccgggcgggtcctagcccagccccagtctggccctggacaaccccagcaaagccgccctcagccagcccagaagcactgggccttggccacagcaacacccactgagcacgctgggagctgagtatggcgtccctggtctcgctggagctggggctgcttctggctgtgctggtggtgacggcgacggcgtccccgcctgctggtctgctgagcctgctcacctctggccagggcgctctggatcaagaggctctgggcggcctgttaaatacgctggcggaccgtgtgcactgcgccaacgggccgtgtggaaaggtaacagccccacccgacgggtcccccagccctggcctcttcccgccagctccgccctgccagccggcagcaaagggccctgggcaaactccaggaggcggaggaggctagtggcagtacctgggcaccctgaccctccccacaggccagagcccaccctcctgctcatgagggcagacaggcctttccagggacacagtccctcttctccccaggaccccagggccaactccccctgccggccctctgccatcaaattggcagtggctccaggggagtcccctggggatgggggaccactgttggggacccctctgcgtgcacccctgtagttggggaagcaggacaggggcctggggagacggaagggcgccaggggttgagagaggatggtggacgttgttggacttgaaagggaaacaggccctcggggaagcccctggccaggcctgcctctcccctccctggtgggcccagcgcccctgctcacttgtctctgcccacagtgcctgtctgtggaggacgccctgggcctgggcgagcctgaggggtcagggctgcccccgggcccggtcctggaggccaggtacgtcgcccgcctcagtgccgccgccgtcctgtacctcagcaaccccgagggcacctgtgaggacgctcgggctggcctctgggcctctcatgcagaccacctcctggccctgctcgagagccccaaggccctgaccccgggcctgagctggctgctgcagaggatgcaggcccgggctgccggccagacccccaagatggtgagggagagtccaggcagaccaggggagtgggtgaggagggtcccacggcccatgggacccggcctggctgcaaagccttcggggagcctgggggcctggggagacgcccaggagtcggcctgcggctggggattcacaacgtggggctcactactgggcagttgggagcctgtaggagccccgggagggacctcatgagggaggaacccagaggcctgagtgggagcctgaagcagctgggcccggcagggagggctgtggctccagggaggggcggggctggtgggggcagatcctgtagttggggtgggagatgcatccaggggcagcggggtggatggcagaaggtcacaccaaaggctgaggcggaggccccctcttccccaggcctgcgtagatatccctcagctgctggaggaggcggtgggggcgggggctccgggcagtgctggcggcgtcctggctgccctgctggaccatgtcaggagcgggtcttgcttccacgccttgccgagccctcagtacttcgtggactttgtgttccagcagcacagcagcgaggtccctatgacgctggccggtgaggcctgggctgggctgtggaggggggcacccccgagtccccagcctccacgtccctggggggcagggccggagcccacacagactcgcggtgccaactcttctccctgccagagctgtcagccttgatgcagcgcctgggggtgggcagggaggcccacagtgaccacagtcatcggcacaggggagccagcagccgggaccctgtgcccctcatcagctccagcaacagctccagtgtgtgggacacggtgagctgcgccctggggtaagatggggcctcaccggggtctgcttgggcccctgagcctgtcctgccaccccccaggtatgcctgagtgccagggacgtgatggctgcatatggactgtcggaacaggctggggtgaccccggaggcctgggcccaactgagccctgccctgctccaacagcagctgagtggagcctgcacctcccagtccaggccccccgtccaggaccagctcagccagtcagagagtgagtgcccacgccgacattgtgctggcagcacagaggtggagcccgtgtaggaaggaaggagtggctgcccaggatgagggatggagagagtgagcaggggctggaagtagaaacaacagacacaggggaaggtggcgtcgccaggagagtggggctttgaggcaggagggtcagcctgagtgagggcctggcccacactgacggcctgcagctctggtgagcagcgcccgggaagcaggggctgagtctggaagaaaagctctcacagccgcctcacccgcccccagggtatctgtacggctccctggccacgctgctcatctgcctctgcgcggtctttggcctcctgctgctgacctgcactggctgcaggggggtcacccactacatcctgcagaccttcctgagcctggcagtgggtgcagtcactggggacgctgtcctgcatctgacgcccaaggtctgcccccacaaacccgcgaccctggccctccgttccccaccatggactcccaggccgtgccctcccagggaccttacccaccccacctcctgacccctctccctgggtcttggtgggaggcgccctgngacctcccccccagcccagcgcccctactccccaggtgctggggctgcatacacacagcgaagagggcctcagcccacagcccacctggcgccctcctggctatgctggccgggctctacgccttcttcctgtttgagaacctcttcaatctccggcagcccagggacccggaggtcaggcttcttgggaaggtacccggcgggtgggtgtgctgggggcctggtggacactgagcacctaccctcacaggacctggaggacgggccctgcggccacagcagccatagccacgggggccacagccacggtgtgtccctgcagctggcacccagcgagctccggcagcccaagcccccccacgagggctcccgcgcagacctggtgagtgggcgccagatgccccatcccacgcggagcccctcccaccgaccccttcccacgcccacactcccagccccaccccaggcctgcggctccgcctcccgcggtgatctggggccccgccccgccccaccgcgttcctcctccacttccgggcgggacttactcaaggctcctcccaggtggcggaggagagcccggagctgctgaaccctgagcccaggagactgagcccaggtgagcccagggggcgaccccggaagggctgggggatctggggtttgtgtggagcgcgggtggggcccaaggcttggcggtaggcgacaggccacgcgaacccacgggcctctgcgcccgcagagttgaggctactgccctatatgatcactctgggcgacgccgtgcacaacttcgccgacgggctggccgtgggcgccgccttcgcgtcctcctggaagaccgggctggccacctcgctggccgtgttctgccacgagttgccacacgagctgggtgagcgcaggcggggcctggaaggagatgggcggggccgcacggggctgggaggggagacctggaacaggtgggcggggcctggaagatgggcggggccgcacctggctgggtggggagaccggaaacaggtggggcggggcctggaaggtgatgggcgggatctgacggctgggcggggagaccgggaacaggtgggcggggcctggtggtaagagggcgggaccgaaaggaggtgggcggggcatgtagctaggagggcggagctgttaatgtggactcgcccgcaggggacttcgccgccttgctgcacgcggggctgtccgtgcgccaagcactgctgctgaacctggcctccgcgctcacggccttcgctggtctctacgtggcactcgcggttggagtcagcgaggagagcgaggcctggatcctggcagtggccaccggcctgttcctctacgtagcactctgcgacatggtcaggatggcgaggggaggggctgctctgggccgggagctgagcagaggagctgagcaggggcgctgacccggtgcccacttgctcctcagctcccggcgatgttgaaagtacgggacccgcggccctggctcctcttcctgctgcacaacgtgggcctgctgggcggctggaccgtcctgctgctgctgtccctgtacgaggatgacatcaccttctgataccctgccctagtcccccacctttgacttaagatcccacacctcaca

SEQ ID NO: 2036 - protein, 737 aa, Homo sapiens [sequence omitted]

SEQ ID NO: 2037 - DNA, 28066 bp, Homo sapiens
  source
  (1)..(28066)
  CDS (201)..(484)
  CDS (1612)..(1795)
  CDS (3747)..(3927)
  CDS (4080)..(4249)
  CDS (4483)..(4627)
  CDS (5505)..(5669)
  CDS (5854)..(5934)
  CDS (6073)..(6263)
  CDS (6511)..(6636)
  CDS (11049)..(11227)
  CDS (16901)..(17396)
  CDS (22082)..(22252)
  CDS (22787)..(22988)
  CDS (23237)..(23324)
  CDS (23401)..(23518)
  CDS (25414)..(25676)
  CDS (26212)..(26357)
  CDS (26574)..(26656)
  CDS (26876)..(26958)
  CDS (27133)..(27224)
  CDS (27616)..(27866)
  modified_base (9246)..(9345): a, t, c, g, unknown or other
  modified_base (21312)..(21312): a, t, c, g, unknown or other
  modified_base (21523)..(21523): a, t, c, g, unknown or other
  modified_base (21534)..(21633): a, t, c, g, unknown or other
agaaagaaggctgcagtaggggctgctgctggactcggtggggagcaggtgcaaggagctctggctcccccatggacctgagctggagagcagagcgcagctccagcccattcctcattcttccagggcacagtcctcaggatgtttcggggagaataggagccagaacctgagcccctaagctattcccctcaccaatgatggggtccccagtgagtcatctgctggccggcttctgtgtgtgggtcgtcttgggctgggtagggggctcagtccccaacctgggccctgctgagcaggagcagaaccattacctggcccagctgtttggcctgtacggcgagaatgggacgctgactgcagggggcttggcgcggcttctccacagcctggggctaggccgagttcaggggcttcgcctgggacagcatgggcctctgactggacgggctgcatccccagctgcagacaattccacacacaggtactgaccccttcctccactccacagggccacatctcccaggtcctctcagtgcttgcccccagttgcctcgttctggcttcctcacgagatccctggagttacaaattcttcagaaccgagctccttggtatctcttcaaaacctctcatgcttctattgccttctctctcttttcttgagactgggggtctcgctttgtcacccaggctaaagtgcagtgacacattcacggctcactgcaacctctgcttcccaggctgaagccatcctcccacctcagcctcctgagcagctgggaccataggcacacaccaccacagccggctaattttaaaaattttttacagagacaagggtttcgctgtgttgcccaggctggtctcaaactcctgggctcagctcagcgatctgcctgcctcagcttcccaaagtgctgggactacagatgtgaactaccaccctagccctccgttgccttctaattctctcctcctccaaatctctaagcccttaaatttcttgctcttagtatcactgttcagtgtctctgggctgatttggctccaaattcgtagacttcttttttcttttcttttcttttttttttttttttttttttgagacagagtctcgctctgtcgcccaggctggagtgcagtggtgtgatcttggctcactgtaacctctgcctccccggttcaagcgattctcctgcctcggcctcctgagtagctgggattacaggcacacaccaccacgccgggctaatttttgcaattttagtagagacggggtttcaccattttggtcaggctggtctcgaacttccaacctcaggtgatccacccacctcagcctcccaaagtgctgggattacaggcgtgagccaccgtgcccagccattcgtagcccttttggttgtcgtccttttttttctgtcccccccagtggcagaaaatggacaactcacagatcttcctaagaatgacattccatggtttctgggtcccaggatctccagtcagtggctagtccccccattccccctaaaatccctgggagcctctcaaagcgggttgatagagaacacaagggaggctgacttgctgtctcatccattccaggccacagaaccctgagctgagtgtggatgtctgggcagggatgcctctgggtccctcagggtggggtgacctggaagagtcaaaggcccctcacctaccccgtgggccagccccctcgggcctggacctccttcacaggcttctgttgctggaccactcattggctgaccacctgaatgaggatgtgagtctgacggtctctagaggggaaggagccatgggattagatggcctgaaatgtttaaataatcagtagttttttgttttgttttgtttttaaatcccaacgtggaccaagcgtggtggctcacgcctgtaatcccaacactttgggaggccgaggtgggtggatcacctgaggtcaggagttcgagaccagcctggccaacatggtgaaaccccatctctactaaaaaatacaaaaattagccgggtgtggtaacaggtgtgtgtaatcctagctactcaggaggctgaggtgagaaaattgcttgaacttgggaggcagaggttgcagtgagcccagatggccccctttgcactccagcctggggaacaaggggggggctctgtccccaaaaaaaaaaaaaaaaaaaaaaaaaaaaaaaaaaaatagctgggcgtggtggcacatgcctataatcccagttactcggaaggctgaggcaggaaaatcacttgaacccaggaggcggagattgcagtcagccgagattgcaccactgcactccagcctgggtaacacagcgagactctgtctcaaaaatgaaaataaaaaaaataaaaaaataaaaaaaaaatatctcactgtggtcttaggggatgttatttcaatagtgaactatgttccctctgggatcagagcaggtgagcccatatccagagctccaagactcagtttaggggaatagatggcaaagcagagaatctagagaagcagcccagggtaggatctggatggtcacctggagaggagacctgcagggaatggatggctgtcttcatccagaaagacagagaatatattccacttacaccagagggcagacaaagctgcctaaccctgatggaggtccagtgagtgcccattgcaggaagcattcaagctgaggctggatgaacatcgacagggctgttgagagggagattagatggcatttcagggtcttttcccttttaagattctggcatggagagctctagttttccaaccagcttcatttatcaaatcaacaaaatgattgaaatgatcagagtttgcagggaagatgatgacaatgctcactagcacccagtttgcatcaaattgaatacctgcattggactgaatattcactaataatacacattgattataagtacccttggccctagtccccaaggtacctgccagtaggagcaaaggggaccctgggagagacccaggagtctatgcaatggaaggacaggtgttaaatatatatatatatatttttttgaggtagagtctgactctgtcacccaggctggagtgcaatggcgtgatcttggctcactgcaacctccacctcctgggttaaagcaattctcctgcctcagcctcccgagtagctgggattataggtgttcactactatccccagctaattttttttttttttttttgagatggagtctcactctgtcgcccaggctggagtgcactggtgcaatctcggctcactgcaacctctgcctcctgggttcaagcgattctcctgtctcagcctcctgagtagctgggatcacaggtgcacgccaccatgcccagctaattttttgtattttagtagagacagggtttcaccatgttgcccaggctggtctcgaactcctgagctcaggcaatctacccacctcagcctcccaaagtgctgggattacaggcgtgagccaccgcacccggctcatccccagctaatttttgtatttttagtagagacagggtttcactatgttggccaggttggtctcaaactcctgacctcagatgatacacccgcctgggcctctcaagggctgggattataggtgtgagccactacacctggccaggtgttaaagatctgagtcatagttcctggtgattctccaatgtatgaccctcaattctccagtgtctgaacggctcccagctgctggtcaattttggcttgagccccgctgctcctctgacccctcgtcagtttgctctgctgtgcccagccctgctttatcagatcgacagccgcgtctgcatcggcgctccggcccctgcacccccaggggatctactatctggtcagcaagtaggagtgggtgggggacaccctgaatcctggaagtggggcccatgccaaaaaggaggctcactggggtcctgcctctccttgtagtgttctctctgctccaccttacgtgtgggaccctcctcttgccctgacctaacttcagcccctgattctccccagccctgcttcagagtgccctggcagtcctgttgctcagcctcccttctcccctatccctgctgctgctgcggctcctgggacctcgtctactacggcccttgctgggcttcctgggggccctggcggtgggcactctttgtggggatgcactgctacatctgctaccgcatgtatgtgaagccccttccttgtacccctggcctccatggatctaaggtgtccccagccataggacatcccctccgcctttccatcagctcccatatcctactcccagatcctggcttcagcccacagctgccttctagtagagcatatgagcgaaggcttgccacaatccatgcaaggggatgttgttgggtataggggcttccagagtctgccctgaccttctctctgtcaggcacaagaagggcggcacgcaggacctggcggactaccagagaaggacctgggcccggggctgtcagtgctcggaggcctcttcctgctctttgtgctggagaacatgctggggcttttgcggcaccgagggctcaggccagtgagtgatacccttttctcctccttctgctgagaccagagtcccagtcaagaactgggccaggccgggcgcggtggctcacgcctgtaatcccagcactttgggagcccaaggcgggcagatcacaaggttaggagttcgagtccagcctgaccaacatggtgaaaccctgtctctactaaaaatacaaaaattagctgggcgtggtggtgcgtgtctgtaatcccagctactcaggaggctgaggcaggagaatcgcttgacttgggaggtggaggttgcagcgagctaagatggcaccactgcactccagcccaggtgacagagcgagactccatctcaaaaacaacaacaacaacaacaaaactgggccaaaaagccaagagatgaggagcagtgtgtgctcctggatctctgacatttgcctggtgtgcaggacctatcggctaacagggagtgggtaggggctccttaagcacagacccaggacttctggccaaatggcatcctattctgagctcaagtcaacaagaaacagaggggaggtgccaacttgggaagaaggtagaggccaaagaacatcccaggtgccagaggtggaaccaggtgttcatcttcccagcttgtggcctggcttccccttagtccctggctctgctgcctcctccaccaggagggatgccctcctatttcagagatgctgcaggcgaaaacgaaggaatctcgaaacacgcaacttggatccggagaatggcagtgggatggcccttcagcccctacaggcagctccaggtgactagaggagaaaatttgaagagtaggttccaagctcacagtccttacttgcagccaccaacactgtcctgtgcttcttcccgcagagccaggggctcagggccagagggagaagaacagccagcacccaccagctctggcccctcctgggcaccaaggccacagtcatgggcaccagggtggcactgatatcacgtggatggtcctcctgggagatggtctacacaacctcactgatgggctggccataggtgtgaggggtgggaacggagggaagcaggtccgaggggaggccagggctcctagttatcagctggggctaggagagggccgtcaggaagatggggagaggacgggaggaccacggaacacaggaacctgcttctgaggagacttttcttctggactgacaacttccgaccctgctggccccaggtgctgccttctctgatggcttctccagcggcctcagtaccaccttagcggtcttctgccatgagctgccccacgagctgggtaggaatggcaggagcagggtggggtggactccagaaaggagatagctccaaggggtagagcttggaggctggtgggtggcatggatgaggggcaccccagcttactccctcccatcctgtcctctgtctccaataggtgactttgccatgctgctccagtcagggctgtcctttcggcggctgctgctgctgagcctcgtgtctggagccctgggattggggggtgcagtcctgggggtggggctcagcctgggccctgtccccctcactccctgggtgtttggggtcactgctggggtcttcctctatgtggcccttgtggacatggtgagagatgtcgggtagagcagagaaatcaagggcagtggggaggcgggagtggagagggaggtagcagtccctccgcctctaccattagctcctggaagggcgtcagaccataggcccgcaaaagtctgagaaacaagggactaaggtgtttgggtgggggctgctgatgctttctgacaccattcctctggagttgagaggtcaggggcaaggccagaatcctgacatcctctttttctttcagctaccagccctgcttcgtcctccggagcccctgcctacgccccatgtgctcctgcaggggctggggctgctgctggggggcggcctcatgcttgccataaccctgctggaggagcggctactgcccgtgaccactgagggctgatggggccagtggaaaggggtcgggttgcccttccttccccccaaccacaggaatggaggcgggacacagggccagtaggagcaataggattttaataaacagaacccatcccaaagccatgactacgacagttgtacttgcaccaaaacagcatagaaaaccagagtgtggtgggaggacccgaagccggttgggggaggatgtgagtaggggcctggagggtgcagggtcattaatctgcggggagaacattgtgctttagcccagggaggggaggggtggggcaaatgcaccgaggtccccactttttcctgctgccctcggcaccctggggatgcaggcatctgggcacatctgccccttattgctgcccaccagcgttaaacgcccccgatcccaacactagcaccacaggtggttccggggcagggagaggcaggaatgggaaaattgcttagagaaagattccactagaatccagtgaattgtgctcagttctctttacttcctacaaccgagtacatgggtcacagggtggagggtgcaacaggacatggaacatgcccctccgtgccccccaacacacacctgcacacaggatggtggtgtctgcagcatcacaggtcatgcagggcatggggaaggggaggttcacacacacatagatgcccacagcgggtaccagacggagaacacccctgaatatacatagctgtacatggggaacccccaggtccccaccccaaccctctcccctgtcttgctgtcccccgcaggggaactatattgctttgagagagccaccccaggggctgctctgccaggcaccctcccctcccacccacccccattttggcacatctgcaagacacacagcagcgagagtaggcaccctcccttcccaggcttctgtggcctggagctggagaagggggtaggagacttcatcctccatcctcccctaacccttcccaaacccctgccaaacccactcaagccagaacccacccccaccccccaaacacacatacaaagctgagctatccaggaacacaagggaaacaaggagattgtccagggtgggagcggaggcagcgggggaagaagactggaagcagagacctccccccttgtggggggcagactggcacaacagctactttagtgcaattggagagggtgcccagagtgagaggtggagaagggagggaaggcggtccccaacttccctgggggcaaagtcaggcttccagattccccagggaaagggcctagcaggagtgggtgagggccaaggtggatcctctggttacccgccaccctctgccctcccaaatgcagtgacagtgtccccctcacacctaagtgggcaacagcagccttggagtcagtaccttcaagtaattcaaagagcagaccctccccaccccagcttcaccccatctctgggatttggtcgcttctctaggggttgggttgggaggagggagcccccaaggcagacccttccctctctacctcccgattcccagaccactgggcttggtcctcaaagattcctcacctccgcccttgcccaacctgggtcaaggctgcagaaggctggagccaccacaattagaggggaaggggctgctttgttccttatccctccttcttaaaaggtagggttcaaactaggcgggatgggggcccatactggtttgccccaggagtagggtttctgggctagggtctgtaaggctattttcctttgcggtgggaaggggaggtaggggatgaacactgggtatgggaagtgggtgagaaatggctgagagggaaggaggaaggggcctccccgctggagcagtcactggagtcatttagacaaaaacactcatgtgcataagatacacagtgcgcaaactcagccctgccagcccggccccaatcccacctctcaggactccttccaagaccctggaggaggttctggggatacagctgtagaaccgttcactctggccccatccaccccacctccagcctcttctccccttctaggtccagggagtaagaaggtgctcgggtgggcagacagtggtggaaacagtattgagttttcctttggttacatattgaaggcaaaggtgagctggacttacagtcaaaacggataggggtgaggaaggaagaggggccatggctggggttggagagggaggtaggccctcctcagcccctccaccccaagaaacacatctacgtggggtggcagtccctcagtcttttctctcccacgccccacagcaccaaacaaaaggagaagccccctcccccaggggctgctccccaccccaacctgggctgtacattcagtggttttcagcagtcctatggctcagggggccacggggcaagggaggtggcccgtcagtctcagtggacagtggcagggacccgagtctgctggtcctttcttggaaccaacggttgggccattccgtttttctgaaggaatgattagaacccctaccagagccaccgcccaatcagaataagtccccccaaaatcagaaaccaagactgggcttttttcattttaccacnnnnnnnnnnnnnnnnnnnnnnnnnnnnnnnnnnnnnnnnnnnnnnnnnnnnnnnnnnnnnnnnnnnnnnnnnnnnnnnnnnnnnnnnnnnnnnnnnnnngttttgctcttgccacccaggctgaagtgcaatggtgtgatcttggctcactgcaatctctgccttctgggttcaagcgattctcctgcctcagcctcccaagtagctgggattacaggcacatacaccatgcccgctaattttttaatttttagtagagacatggtttcaccctgttggccaggctggtctcaaactcctgacctcaggtgatccacctgcctcggcttcccaaagtgctgggattacaggtgtcagccactgtgcctggccacaaagtttaattctttagtaagctgactcctcagacatctctcaccaaatgaagtcttacaagtctgagaataaattttctctcccagatcccatgaagctctaacaagttctagtctgaatcattctgattactggccacagcctcttttttttttccttctttcttcatcctctttagatgtatggtggcatgagaggcatgaagggattggtctatgagacatcagttcttgatcctgatgaggtaagacatcttcatgtcaattactaataatcattgagtttgtgcaaatacgcataccgtggattagaccagtaagggtaagcacaaaacagagcacctagcttcatatattggaaggtagagaagacatatgtatggaataattgaagaacaaatttaccttttaaatatatcaactagtaaaaataaaagtacaaaaccagaggtaagttatgtgaagatttaagcttaatttaaagttctgttctggactgggcgcagtggctcacacctgtaatcccagcactttgggaggctgaggcgggcagatcatgcggtcaggaggttgagaccgtcctggctaacacggcgaaaccctgtctgtactaaaaacacacaaaattagccgggcatggtggcaggcacctgtagtcccagctactcgggaggctgaggcaggagaatggcgtgaacccaggaggcggagtttgcagtgagccgagatcgcaccactgcactccagcctgggcgacagtgtgagactccgtctcaaaaaaaaagaaaattaaaaattgtattctgggctaggcatgatggcttgcccctgtaatcctagcacttttggaggccaaggtggagcattgcgtgaggccagaagatcgggaccagtctgagcaacatagcaagaccccacctctacagaaataataattaacataaaaagttctactctaacttgttgtaaggtctgatgagtaagaccagtcgtgtgacttctaggctataaacttgagttgtaattctctctctcctctctcaagggcatccgtttccgaggctttagtatccctgaatgccagaaactgctacccaaggctaagggtggggaagaacccctgcctgagggcttattttggctgctggtaactggacatatcccaacagaggaacaggtaaagcagaaggatattattagctcttctcattccccttcttcattgcctttctctaatctcagacacttaatgctgatccggcatttatagagatgcgtagtgaagggaaggaatcagcagagttctgctgtataaatggattgggttgacctctcttgggttttctttactcagatgttgctgtccttttttatttttctccttccttgtccttgctggtgttctgagcactgtctctttttccacaggtatcttggctctcaaaagagtgggcaaagagggcagctctgccttcccatgtggtcaccatgctggacaactttcccaccaatctacaccccatgtctcagctcagtgcagctgttacagccctcaacagtgaaagtaactttgcccgagcatatgcacagggtatcagccgaaccaagtactgggaggtaggaaatttgggtggggtgatcggtgtgtgatggggattcaaaggacttgagtgtgaagggagggaaaaaatacagaatctttagaaaaattacctctgagttaatcagaaactaacttaacagattttcattggaggcttgttttttgtcagttgttggaattacaaagctaagtagagcatggtttctatcaccaggactgtttgtttggttaggctgacacacgtgcagaaaaaagaaattattaaaattccatagtcggccgggcacagtggctcatgcctataatcccagcacttggggaggccaaggcgggcagatcacgaggtcaggagttcaagactagtctggccaatatggtgaaaccccatctctactaaaaatacaaaaattagccaggcgtgatgccgggcgcctgtaatcccacctactcaggaggctgaggcagaagaatcacttgaacctgggaggtggaggtttcagtgagccgagatcgcaccactgcactccagcctgggcaacagagtgagactccatctaaaaaaaaattccatagtcttgctgtaacagaggtatgtacacatggctgttgaaacggaaaagagacctaggtaggtggctcacacctataatcccagtgagtcatgatgctgaggtgggaggattgcttaaggccaggagtttgagatcagcctgggcaacatagtgagatcctatctgtacataaaaaaggagaaaacaagaaaagaaaaggatgtgacttaactgcagggtccctgaggaaggtttcacagagcagtctcatgctagcaccagagggtcactttccctcactatcttcttcaaatacagaaaactttgagaaatcttacaagttgggagaacagcaattgcaactctggagtctaggaggactaatgccagtcagtcatgttctcggctagccaacctaagatacccatcaggagtgggagagtggttagtatccttggagtaggctccagatccagaaacaaatgagctttattctctgaaaatgaaaagtgtccttaatagtttacaacgctggttggggtatggaaagattgtttcttatcccaatgcatagtacataattccttccatcctcttctagtaccccacaaactcagaaacactgggtaaaagtacaaatgatctggctaggtttacaggagaatgtaccattttcttttgttccttatttggagataggtagtataggaacagaaaattttctttttacaaagcaggtacattaaatgatttttggccaggaggtgccagccaccaggaaggccctaaagagttcactgtggtgcaagacacagaagagcatgacccactgctctgatgcaaccaccttgggtccttggcaaatctagattgatttagttggtcaatattaatttggcaccaactgtgtgtagagaattgtgtttgcagttgaggaagacagagagcatttaaaattgatattaacttggttggcattggggagttggtatcagaatgatgcaaaatatacacattcacaccacataaagcatttatttataaaggcttatttataaacactttaggtggtatgaatgtgtatatttgtacctgcacacattagcaggtacaaaaggtcatataatcttaatattttgtttttcattttatttatttatttatttttttgagatggagtctcgctgtgtcacccaggctggagtgaaatggcatgtgaaccaccgtgcccagccatttttatttttatttttttagaaataggtctctctctaatcacccaggccaggatgcagtggcatgatcatagctcactgtaaccttgaactcctggactcaagtgatcctcctgcctcagcctcccaagtaacaaggactacaggcacatgccaccatgtctagctggcattacaggcgcacaccaccactcctggctaatttttttgttttttttttttgttttttttgggagacggtgtcttgcactgtcacccaggttggagtgcaatggcacgatctcagctcactgcaacctccacctcctgggttcacacaattctcctgcctcagcctcccgagtagttaggattacaggcgcacaccaccacacccagctaactttttgtatttttagtagagacagggtttcactatgttggccaggctggtctcgaacctcctgacctcgtgatccacccgcctcggcctcccaaagtgctgggattataggcgtgagccaccatgcccggccgaaatatctttatagcaacacagtgagttgatgtctccaggagacagttgacagtgactcaaaaatccccttactgagttgcagctgatagttcacaattgccagatgtggtggctcatgcttgtaatcccaacactttgggagaccaaggaaggaggatcacttgagcccagaagttcaagaccagcctgggcaacatggcaagaccctgtctctaaaaaaaaaaaaaaggaaaaattagccaggtgtggtggtgagtacctgtagtcccagctacttgggagagtgaggtgggaggatcgcttgaggccaggaagttgggcagcagtgagcaacgatcatgccactgcgttccagcctgggttacagagcaagaccttctctcaaaaaaaaaaaaaaaatcataatcatcatgtaagacatacagcttagggccaggcgcagtggccaacctggccaacatagtgaaaccttgtctctactaaaaatacaaaaattagctgagtgtggtggcatgcgcccgtaatcccagctacttgggaggcggaggcagaagaatcgcttgaaccagggaggcagaggttgcagtgagctgagattgtgccactgcgctccagcctgggctacacagtgagactccatctcaaaaaaaaaaaaagaaaaagaaatacagcctagtaatgctgaccttggtctgaatttatagccatgccaattacaagctatgacactgggtaggatacttcatctaagtcttggttttctcttctttttattttttaataccttgaaacttagagttgttgcaaagattaagataatgcacattccaggccaggcacagtggctcatgcctgtaatcctagcactttggagaccagcctgggcaacatggtgaaaccccatctctactaaaatagaaaaaaaaaaaaaaattagccaggcgtggcggcgtgtgccacctaggaggtggaggttgcagtgagccgagatcataccactgcactccaggctgggcaacagaacaagactctatctccaaaaaaaaaaaaaaaaaaaaaaagataatgcatgttccacatttagatagtatctgcaaatagtaagggatcctccagtttaagttttagctattatctattaaatagaggcgtttggtttaccttgtagtttaagggtttaaatttagattttattagcccacttgtcctttgccactagggggtgctattgcctccctacactttaaagaggtcctcccaaggtcacaacaacctaaattctcagccttctctcccttgccccttcaagttcccaagcacttagttatacctggacctagagctcacttggctgctttattcatgccaatctttcttccttaacattctctccaacctccccaggtcccatcagtgttgagaaggaatctaggccagctcctgggagatgccagttagccgctttgatcctgtgctttccaattgcccttatagcagtcgatgtcaggattggacaacttcaaaacaagtccataaagtccccatggcactaggggctctgggacccagtgtcgagaggcttagagcattgctgttccccacccaatcactaaagctccaagacagatgatcctgtggcctctcaataattgtccctttggtagtctcatcctggggcactgaagttcagtcctgtggtctgctggttagtctctgtggataattaaccagagaaaaggaaccaggtcagactattctagggttatgtggaaatcctttatgagatgctaaatggggagcaaatattgatcagtgaagctttgaagtcaccggggtcttcaaaggtagctgaggtcagtgctcctctggagcattgcctaaagttttttcctgagacctaactatctgatccccaggccagaagagcattggttgttaggtgtgaagctgagtataaagaaaattaagaagagaaaataggggttttctatctctttttccaagtccaagctagaaactcggttctttgtaaaggagatctatctaaacctggcttaggtggatactgagacctgtgatccttgttactgctatgtggtgagataaaagggctattcacagctgggcacggtggctcacgcctgtaatcccagtactttgggagcccgaggcgggtggatcacctgaggtcaggatttcgagaccagtctgaccaacatggcaaaaccccatctctactaagaatacaaaaattagctgggcgtggtggcgggcgcctataatcccagctactcaggaggctgagatcgcaccactgcaatccagcctcagctacagagcaagatctgtctccaaaaaaaaaaaaggcttttcacttggggctggaggtttgtagataagatgctcttgtccttggggtcaatgactacgacaggcttagggaggcacaaaagtcctgaagcctcgtctacccagaggatttagaaagtggtgcggaatatcacttcagggtcgtgtcatggtctctggggagcacaagataagagagcatagaagactgccaagtaggagaagtggcccagaggccctagagaatgtgaccaaaggggatcttcgatgaggggctagtctgcggctcctaatctgtggctaaagtggggtgagctgctgtgtggggttacgtgaccagagtggcagtgagactaatgcccatgacccagaagctgtggctggctcggaaagccttcatagtaagggcgcagttaagacttggatttcctgccattacacacagaactgacagctcacaaagcactggatattcaggctcctgcttttgcttttctccccatatcggggtctgttagtatctataatatcgtggcctctgctgacctcaaatgatctccaccgagcagctaactctggcatcctagcctgttgtccacatgatgtcacctccatggccgtgaagccattaaccaaagacattcctcaagaaagcgcgccaaggcggtagaaggatcaggcaatgatcagtttccatgatcatattacggaattggctccaaggaccttcagaggtcgagtcctggagcgtctcctttagcattcgcctcagagataaccccaaaagtgttaaggtcaaagggaaaagccaagagggaagttaactgagttatcaggcacctatttagccacccgcacttccccgcccgccacccatccacccttaattagccctaatccgggcggtccaatcctccccgtcacaactgctgtcaagggctaaggtcccgccccgcttccataccggaccaatggccgggcccggggagagtcccttgagaggggcgggctcgggttccggccagtgggcggggcctccttgaggaccccgggctgggcgccgccgccggttcgtctactctttccttcagccgcctcctttcaaccttgtcaacccgtcggcgcggcctctggtgcagcggcggcggctcctgttcctgccgcagctctctccctttcttacctccccaccagatcccggagatcgcccgccatggctttacttactgcggccgcccggctcttgggaaccaaggtgagcagcgaggggagggagcacgccgtcccagggtggggctgaggcgaccgcaggccctccggcgccggggtctccctcccacacccgtgcgcaccctgcgcgccttaaagggccctgcgcttggctggccgccagccctgcgtgaagctacaggaccatgtgccgcgcttcccttctggctcctgggggtgaagtgcacgccgcccgccctcggcccgcagtccagaacgcgtgaggaggccgaccctgctgtcaccccgcatgtctgaaatgaaaggggaagggatgcgtggccctgaaatagcaaggagccgagacaggaacctctggtagagactagagatgtggtgttccactggagttacagtcagtttggtggagggagcgggagtgaagatatgtgctcactctggagcagtggctaatttcgtcctctgctttgtaggaagggccttgtcagttcccgaactgcctgtttccatttctccaagcctattatttaagccttcggtgaccacgccgagcacaagagtgggtccttcaggccctcctctttgtccttgggactcttgcactttttatataggaggagcttgggtggggtggagcacttctgtacaacctcctgcatgactatcatacatgattgcagaaagaaccagaaaggtgtttccaccaaactgcaagccaataaatgaagatcctcggcaagagatactaatgccaaggtcacatgaccgtcatactacttgcttacccaggttatgccgttgatcttaagtctactttatccaggaactttctctccttctttggggtcctttacttggtattgattgccttttgggacatagaaatactgttgcaggtaatgatgccttcaatttcaaattgcagtacttttagttctaagtaacttggcccttttagacagaaactgctgtgctgagggagtcccagccctctaatccaagcaggggacagtcccacaagtgaccttgacttctgcaaagaacttagtttttcctgcggataatttaaagctgacagcatctgaaggaaaggaaagccttaggatggttttggcttgctgtatgtaatttttttttttttttgagacaggatattgctctgtcactcaagctggagtcttgtggtgtgaccaaggctccctgcagcctccacctcctgggctcaagcaatcctcccacttcagcttcccgagtagctgggaccacaggtgtgcaccgccacgcctggctaatcttttttgatttttagtagaggcagcgtctccttatgttgcccaggctggtcttgaactcctgagctcaagtaatcttcctgcctcggcctcccaaagtgctgggattacaggtgtgaaccactgcacctggcctgctgtgcgttatttttcatggttggcacaaagtgaaatttgtttgatttaccttggttcttccaggcacccagtggcaagtactagctgagcatttgggagatgcttgtcttacttggctgttgcttctcctgctgctggggaaaagggtaaggaaacctcttgggaaatgaagcaagttctagatagcgttttggcagaatgggggacactataattagctcatttctgagctgctaacccagaccagatagtctaaccctgcagtgaatgtgaaaaagccttgggatttacctattgaatttattttcctccttaagcccatagggaagctcagaacacttttgggatgacagagctacataattatggtaccattattttcctgttagagatggcctgacgatcctagtcacctatcagttgaaagccattagaaggcttttgacccttaaaagtaggtcaggtgcagtggctcacacctgtaatctcagcactttgggaggcagaggcgggtggatcacctgaggtcgggaatttgagaccagcctgaccaacatggagaaacctcatctctacgaaaaatacaaaattagccagacatggtggcacatgcctgtaatcatagctacttgggaggctgaggcaggaggatcgctcaaacccaggaggcggatgttgtggtgagcccagatcgctccattgcactccagcctgggcaacaagagcgaaactccgtttcaaagagaaaaaaaagggcggggggggtagcaaagcccaataatgagtttattggactggaaatctcctgagaaataagcaatatgaccagggtaccaagaagcttgttggcttgtcagcattgctagcacctgcctgtgctttctagattagcctgtggataatgctagtcataattggtaattttacttttgctagtaaggtagactttgggaggcagtaatttcctaccagggagaactgactcttaccactttgagtctcagcgtcaggtgtagttttacttttctgagaagaaatttttttttgttttgagacagagtcttactctgtcactcaggctggagtgcagtggcgtaatctccgctcactgtaacctctgcctcccaggctcaagcgattctcgtgactcagcctcctgagtagctggggttagcaggtgtgcaccaccacgcccagctaattttttgtatttttggtagagacggggtttcaccatattggccagactggcgaatttttttaaccttactaggagacaacatgtgaattagtcattgttctattgttctactctcactgtcacataatttaaatgtcacataatttaaaacacctgagttagaagctaattcagagagctttgagattatttgacttcttgtttatccaaattcattaatgctaagcaatggccttagtattatctgtgggtgactcagttttgtgacatcaaaaatgtcttttcacagatgatctgggtttggatttgggctaggaattgaagtagggctgcagttcacttctggacttttgaagtcaacatgcttaaccaaccctagctaaagggaactgtctcttgagccactgaaaattgcttctccaagctagtatgtttgaaactgagtaaatcaattcaaagatgtttctagattacttctagactttttcaagacacttaaatgcaaaggaaccaatggtttctttacattggacttataccactgtacaacatcacctgtataagtcctactcagaaattgggttcaacaaaaccgagttggttttgtcctgcaaaatatttagttaggttttaaagcccaaattttttaaaggtaagggctcatatctctgtgccctcactttgactatcagcctacccaaagtaacggtgattccttgatactagaatggcaggggaagccttatggggtgttagtggtgagatgactgcatttggtcttcccagtggcctttaggttggtagcaggtgaatgaatgcatggggaggcagcaagaatagtatggtaggtagcagcgatagagttggcattcctgacttaaaatccaaggggcagcagaagggaaaccagacttggtggatttcaataaagccacacaatgattctttctgccctgtgtcaatactttatgcaacagagtaggatgtgaaatttaaaaccgtaatgaggcaactgtagcaatagatctttcttagcatctgattatctttcagttctggcttcaactgtgcttcaactgcacaagttccttagttctctgttttgggttttttttggggggtggggctggagtgcagtggtgcgaacatggcttgctattactacagcctcaacctcatgggcccaagcaatccccccgagtagctgggaccacaggcacgcacagccacgcctggctaatttttttgtagtttttttggagacagtgttttgccatgttgtccaggctggtttcgaactcctgggctcaagcaatccaccagtctcagcttcccaaagtgctgagattacaggcgtgagccactgcacccagccctctgtatttcttttaacatgatgctattttaaaaggtctgtaaactcacagtgggcattgtcacctgtaatgcttgcttatgttgcagtttcctggatcctaccttcagattacaattctgcaaagtaggatgggatctggaaaagtttcttgtaaatccctaaagtgtcagggagttaaaacttgtaagaacttctttnttttttttttttttttttttttttttgagacagtttcgctctgtcgcctaggctagagtgcggtggctcgatcccggctcactgcaagatccgcctctggggttcacgccattctcctgcctcagcctcctgagtagctgggactgtaggcgcccaccacctcgccccgctattttttgttttttagtagagaccaagttgcggattattnaccgcaggccnnnnnnnnnnnnnnnnnnnnnnnnnnnnnnnnnnnnnnnnnnnnnnnnnnnnnnnnnnnnnnnnnnnnnnnnnnnnnnnnnnnnnnnnnnnnnnnnnnnngggactgtcgttactaccctcctactaaggggtgagaacactgccaagggagcacagaggaagaggcatctttcccagggaaggctgggaaaggcctcacagaggagagaagctgggactgagtttgagatgaacaggacttattcgggtgggctgggaggagaaagcatcctagggcaggggttggcgtgcctggaggtggggaaagcatgttggtcagcagaaggctgataactgaacatcatgctctaggttctctaggagagcattcagaggataaaggagggcattgaagccagaggggttcagggcagaccttgagaaggtaaagtgggtctggagctgccattgaagaatgggtaggatttagagaacctacctagagctgaggacgggtggcggccaggtaggcctggagggccttggtcctctcctctggccctcccagaactgtgccctcctgggctgggcctgtccctgcctcacagtctacccccggctccccagctgtctggagttcttactggataacggtgcagacccctccctgcgggacaggcagggctacacagctgtgcactatgcagccgcctatggcaacagacagaacctcgaactggtatgtgttggggcccggcctgcaggaggggaggcaggggcagggcacagggtttgtggattccaaaactaagggttcaatcaaatgtggtctttggatccagaggcttagtggggattactgcgagtcggggactggggtactatcttgggagttccagagtctcagcacctactttcctgtcctttgcagctcttagaaatgtcctttaactgcctggaggatgtggagagcaccattccagtcagccctttgcacttagctgtgagtcccacgtcttttttctgttgccttccttgtcctacctgttcccaggccctaacaaaggtgccagcacttgtgaagttatccttccttctgcctttttgtgggagaggggataagcacagtgcagggtaggaagccttaaggggcccaaggagcttgtcaaggactaagaccttgagcttcccagggaccccaagagcagagaaggggaagggaggagcagggaaggtcccgagctgtgtgcactggttgcctgcaccttgccaggcctacaacggtcactgtgaagccttgaagacgctggcggagacgctggtgaatctggacgtaagggaccacaagggccggaccgcactcttcctggccacggagcgcggctctactgagtgtgtggaggtgcttacagcccacggcgcctctgccctcatcaaggagcgcaagcgcaagtggacacccctgcacgctgctggttagtgcccactttaggctgctgccctacccttgccatgccagatccctcctggatgggaatggggctggaaagtggagtagggtgaggagaatggagacttcaagccctgattcatagcttcctatcctcagagatttctccctggcccaggtctttctgtaacattgaccccaagtcctttaggcttgaccttgcctcccttcttcctcctggccctgccctgacacggggtccctttcccctagctgcctctggccacactgactccctgcacttgctgatcgacagtggggaacgagctgacatcacagatgtcatggatgcctatggacagtgagtgtgggccagggtggggtgcaggttttccagtccttgcgggatcctcactcctcctcctgcccttctgtaggaccccactgatgctggccatcatgaatggccatgtggactgtgtacatctgctgctagagaaaggatccacagctgatgctgctgacctccggggccgcactgccctccaccgcggggtgagtgagcttctaggggggattgtttgcacatgggcctcagtgtgggagcatgggactcaccagcagtagggaatccaattgtctaggaggcaagccaggattttgtgccgtcttttttctttttcttttttttttttttttttgagacagggtctcactcccattgcccaggttggagtgcagtgacactatcacagctcactgcagccttgacttcctgggctcaggtgattctcgcacctcagcctcctaagtagctgaaactgtaggcacatgccatcatgcccagctaatttttgtattttttgtagatatgggggtcttaccatcttgcccaagctggtcttgaactcctgggttcaagtgatccccccaccttggcctcccgaagtgctgggattacaggcatgagccaccagacccacgctgtgcccaggattttattgagctttgtgcttgctccaggatgagttcctgacgtccccagctgatttccctgatatctgtgctttgtttattaatattattattattattattattattattattattattattattattattgagatagagtctcgctctgtcacccaggctggagtgcagtggcgtgatctcggctcactgcaacctccgcctcctgggttcaagcaattctcctgcctcagcctcccgagtagctgggattacaggcgcctgccaccacgcctggctaatttttgtatttttagtagagacaggtttcaccgtgttagccagggtagtctcaatctcctgatgatgagatccacccgccttggcctcccaaagggttgggattacagggcgtgagccactgtgcctggccaatatctgtgctttgtaatcacgtacaactgagtgctcaccacccagactctacctgggataccctgctggccccaacccatcgcataatgtcgccacaacctagatcctcttccgtgaccacctgtcctaagctgcctcctcctcccataagattttttgatcccttagtctccttctctccatttagtctttccagtattaactccagagctccagtattaactcttagtatcctgattgtctgctggcatagagagagtcaaggagggagatgtggtccctaatacttagaattgttgttgtaaagggccgggcatggtggctcacgtctgtaatcccagcactttggaaggccaaggcgggcagatcacctgaagtcaggagtttgagaccagcctggccaacatggtgaaacttcgcctctactaaaaatacaaaaattaattgggcatggtggtgcatgcctataatcccagctacttgggaggctgagacaggagaattgctggaacctgggaggcagaggttgcagtgagccaagatcgcaccattgcactccagcctgggtgacagagtgagactccgtctcaaaaaaagaaagaattattgttgtaaagacaaggattgaggccagtggctcatgcctgtaatcccagcactttgggaggccgaggcaggcggatcacgaggtgaggagatcaagaccatcctggctaacgtggtgaaaccctgtctctactaaaaatacaaaaaaattggccgggcatggtggcacctgcctgtaatcccagctacttgggaggctgaggcaggagaatcgcttgaaccggggaggcagaggttgcagtgagccgagattatgccactgcactccagcctgggcgacagagcaagactccgactccaaaaaaaaaaaaaaaaaaaaaaagacaaggattggagccctggaagtggttcttactcctgagccagactccagcaacaggccagtggaaaaggaggagcttttcatccccctcacacccccatgttactcacaggcagtgactggctgtgaggactgcctggctgccctgctggaccacgacgcatttgtgctgtgccgagactttaagggccgcacgcccattcacctggcctcagcctgtggccacactgcagtactgcggaccctgctgcaggctgccctttccacagatcccctggatgccggggtggattacagcggatactcgcccatgcactgggcctcctacactggtactagactggggcctccacaggcacaggagcatgtgttggagtgtgtgtagagggggacaggtgggttgttgggggggacctgggttgatctgaatctggaagtggaatggagtgtcaagacacaggacagacagggaaccttgccgtttttctccatcactactcttccttcctcgtgcccaggacatgaagattgtctggagttgttacttgaacacagcccgttttcgtacctggaaggaaaccccttcactcctttgcactgtgcagtgtaagtcccttctgctgcatcagcccttctcgcgagggcccatgacttgagcttaggacaggtagtctacttcccttgtccttcctgatgacccctcctccctcttcctctaggattaatacccaagacagcaccacagagatgctactggagctctgggtgccaagattgtgaacagccgagatgccaaaggacggtgagtgatggaagacttgggaagaatcccagttgcctctggcttcccctttctgcttgggcagtatactcttccctattttaatctaccctgatccctgccttacaggaccccccttcacgccgctgccttcgcggacaatgtctctgggctccggatgctgctgcagcatcaagctgaggtgaacgccactgaccacactggccgcactgcgctcatgacggcggctgagaacgggcagaccgctgctgtgggtgtgtaggggccacttgtggaagggaggagctcccctggggcatttgcaggatgggtcagccctgcctgtggaggctggctggggctggggttcagaaagcaagagggttgtctttggatgtctcgccatctgcagacgggatgcaaagtggagagccaggatggctactgctctggagggaggggtcagtccctctatcacatttctctcgtagaatttctgctgtatcgagggaaggcagaccttactgtgttggatgagaacaagaacacggccctccacttggcttgtagcaaggtacttacctgaagtgattgggggactgcataaggggcagagcttgatgaagagaggtaagtctcggttgcagaggggactggggcagaagtgaggattgtccagcctatccgactggttgggcagctgtttgtcctcctgttactctccccaactcctgccctgcaccctgccacatttctacttcacaagtctccactctctgttcccctccctcagggccatgagaaatgtgccctcatgatcctggcagaaacccaagaccttggccttatcaatgctaccaacagtgcgctgcagatgtgagtgcctggggaagggggctcctggctgggggaggccagtgggtgatgaaagagtggccgctgttcagaggctctctggagcccattgtatttgttcagcacccttgccaccctgtctggaggtggaagggcagcttagcatcaagctccttctttttccttttttccaaggccactccacattgctgcccggaatggtctagcttctgtggtacaggccctgctgagtcatggggccacagtgctggctgtggatgaagaaggtgggtggggtctggggccccatgcctctcttgggtttggggtcagggacattcttcaggaggtgacttcttaatcttgctatacatgggattttcttcccaagggaactcttcagagcagggagcccacaccagtactctggagtctcagaggggagcctgcagggtcaggaggactccacaccctaggctttgactcccatgcccgccctttaacccgtacttagagaatctgcctgtcagccttcctgggccctcgtcacccttggattctgccgctgctgggtactgcctgccttggctccctccacagagaagagacttcagggcttgggggaggctggctaggatacaggactctatgcctcagttctcccccttggccctgcaggtcacaccccagcactggcctgtgcccccaacaaagatgtggcagactgcctggccttgatcctttccaccatgaagcctttcccacccaaggacgccgtcagtcctttcagcttcagcctgctcaagaactgcagcattgcagccgccaagacggtgggtggctgcggcgccctgccccatggggcctcctgcccctacagccaggagcggcccggcgccattgggttagatggctgctactctgagtagccccctccagtgtccctcccccgccggtggcttgatatctaattctatttatttagaaaaagtctaaacatttagggcactttaaaggagaacacgactgggtggagggggcggaggggaaggaagccctggggagcagctgctcacccctttgccacaccatcttggcctggcaggggtctgggactgacagggagcac

SEQ ID NO: 2038 - protein, 1232 aa, Homo sapiens [sequence omitted]

SEQ ID NO: 2039 - DNA, 16291 bp, Homo sapiens
  source
  (1)..(16291)
  CDS (201)..(1451)
  CDS (1731)..(2024)
  CDS (2063)..(2757)
  CDS (7403)..(7749)
  CDS (9923)..(10073)
  CDS (10186)..(10354)
  CDS (12287)..(12442)
  CDS (15669)..(16091)
ccagggcaagggagaggacgacaccaaggaggtcactgcgtcgtaggagagggccagcgtctgccgttacgaagagttgcaagagctgtgcctacttctgcccagataccaagaccgccagctcctggatggacatatccttgttgacatagcggtcatactgagcaggggtcagcctgccactctgcagggcctcttcgatggagaacttcttgccagacttcctgtcgtgtatcactgaggactccccattgggacccttcactgagatctcctcccagtcgcactcctggcttctgagtttcacgaacatgttccagtcaatgagcccggcacggtgggcttcctccggggacagctcgcggcctgtgtcagggtggatgactacgatggagcgccgcaggtggttctcccgctgctcccgcttgacggccacggagcccaggcgcttctgcagctcgtcgatctcgaggtctttgtccttggagagcctcttgaggtcatccagttccctctccagggaccacagtctggagtcatggttggtcccagagtccgccacggtcatgttccgcaggtctcgtgtttccgtcgctgccatgttgatttccgattggagccttcgggtctccagctgcaggttttgcctctccagctgtaatttgtggttctcttccctcagaaagtctagttccttggatgacttggagttatggaattccagctccgaaagcctggcttccagccggctcacctcgacgtccagctcgcgcttgctgcggctctcctcctccaggctgctcttgagcctctggatctcttgctcggtgtcgcccttctccacctggacactctcggagagcaccaccttctccttgacctccgccttctccagtgcagccagtttcctccggagggtctcgagctccccctccaggagctgccgccggtgctgctcttcttccagctggagtcggagcagggcatgctctcgcgcctgctgcgggtcctgctgcagcaccaccttctgcgtatgggttaccttctcacgggcctcagcttcttcctgctccagcgctgccagccgctgctgcaaccgctgtacctcgcgctcggcctccctgcgggcctgccgctcgcgctctagctcctccagctgccgctcaagctcggtgcgccggcgctgcagccgccgcagctctgcccgcagcttgtcaatctgccgcagctccacatcgatgctctcggcaaaggcgctcgcctcggcccgcaggcctggctcctcctcatacctgaccacctcctgctgcaccaccctttccttcacccgcgagagctcctcctctttccgggcgatctgctcttcctgggaagctctttccctctccagatccacttgtttcttctgctcctctgagagctttgccctcagagacgccacctcctccttggtttgagggtcttcttggaattggaggatctcctggaccacctctttggtctggacctggggtttggtgtctttcagggcctggatttcctttttcagctggtagatctctaaatcacacctttcgatcagtctggtcttgtccacgatctcctccctgagccgctgaagctccttctccatctcagggtcagtcttgtacttaatgacttccttagtcacctctttgacttccacctgggggcctcgcctcctgagggcctccagctcactctggtagctccggagctgctcctcggcaccccggtactttcgctcctgctccacaagctccaggcggaggttcgccacttcactttccgccttggggtctggccgcacgatctcccgcaccttctcctgcaccaccactttggcgttctcctcctccaaggcccatatctttcggagcagctccgtcttctccctctggctagcgcgagccttggcagcctcgtcctcatattggcgggtgagatcgctgacctccctctcggtggccgcgtccttctccaccttgagcacctccttgacggtgatcttgccctcggccatggcccgctccttctctagcctcttgagcttgtcctggaggaagctcagctcctcctcctgcttctccctgagctggtcctggcgctggtggtcctcctgcagctgctggtactctgcctccagctgggggtcattctgcagtttcaccacctctttctctgtgaccttctcctgcgcccggctcttctcttcagccagggcggccacacgctgctgcaggaggagcacctctgcctcccgggcgcccttctgccgcctcagtgcctccagctcctcccgcagctgcaagacctcatccgcctgggccctgtcaggctcgatgcgcaggacctccttgaccacgtactcctgccccccgtctctggtctcctgctccagggcacgcagctgcagctgcagtgcctccagctcctcctgcagcagctggttcttgtgctgctcctctgccagcgtccgctgcagctgctggaagctctcctccagcacgggatccggcaccttcttgagcacctccttcctcaccaccgattcctgaggcccctgattcctcaaggtccagatttcttcctgggtgctcttgacctcgttctccagctgccgcctccgctcagtctcctcatccagttccttcctgatcttccacgcctcctccactccagagtccggcctattcctttgcagggtctcatgggtcacttctacttccggctgctgtgatggagaagacaagacaaggttaaagccaggctctggcagcacatgtagggcctgtccccacctggtcagagtggctgtcctgtggtccccaagggactccctcagtgccagttcatgttagttgtagagttctagggttactttcaaaaaggatcaaacaactagtttggggttttttttaatcaggtaaaacatttttgagctgtggaagagtttaaaatgaaaccacggtctcccacctctggtccccgtcctagggcgtgtctgtcagccttgcagatgctatctgtgctcacacaagaatatctgtctgtagtatgtaccatgtgtttatctctcctgcacaaatggtattcctgctgctcactgcacttacagagctcattccagctcagcacagagagtgctgcttcaggatttaccagcagcattgtttccgctctctggacagaccgcagtttagcccattgctgatgaagagtgaactgcttccagtgtcttgctattaaaaaacaatgctgtcatcaacatcatggacttcagaaaataacattcactttcttttgtttctttctttttttctgagacagagtctcgctctgttgcccaggctggagtgcagtggcacagtctcagctccctgcaacctccacctcctgggttcaagcaattctcctgcctcagtctcctgagtagctgggattacaagcatgcgccacgacgcccagctaatttttgtatttttagtagagacggagttttaccatgttggccaggctggtctcgaactcctgacctcaggtgatccgcctgcctcggcctcccaaagtgctgggattacaagcgtgagccaccatgcccagctgaaaatagcattcactttcagcagatgtttactgagttgaataagttctcatgtcagtagaagcattggctcgggccagtctttgcattggccctgcccagaaacgttagcaaggggacacttccatcaattcacaaaccatttctctaagacagagtctgtatttgtcacctgttagaacagcctgaagtagaatttcttactaagatcagttacctgtctgaggagattcagagcaaactccagattctgcagcctctgtctgttgatggcataaacttcagtgaacttggcggcaagtgctgcttcctgcagagaagaggattaggagagcggtcaacaaacaggtgtcaacagggtaagcaacagagagctagacagcgtggacgtggttcttgagaagtgtggaatttgggggtagaggcatagctcttgcccactcctgcctggagttagactgtagcctcaccggtggagagaaaaatggatctcgaggcagaagatccaggccagggtcttggccacactgactttgagcaagtctttctgcctcttagagcaccagtgttctctcttgtgtgtacaggagactaatatcagccctccactgtacttactgaggtgagcaaaacaggaacttcccagatccatggttctgaccctgacacttctgttcagctgcattttcaaaaatttttatttcttaaagacagaatctctttcactcagactgaagtgccatggtgtgattgtagctcactgcagccttgaactcctgggcccaagtgatcctccctcctcaacctcccaagtagctgggactacaggtttgcaccaccacgcctggctaatatttttgtagatatggggtcctgctttgttgcccaggctggtctccaacccctgggctcaagcagttctcccacctcggcctcccaaagtgctaggattacaggtgtgagccactgcgcccggccttgctgtctttctaggcatattgatgtcactgccctagaacaagttcctcatctcttaccaaacctgtttgcatgcaggagggctctcagtggcttccctgttgtgtgtgcatctctgaggccagcgtgtgacaccatgctccctggggagcagggcagcttggcctccacctcagtcccgaggccgcctggcccatggaactcacctcttccttcactttggtggcaggagattggagcctggctctcttgctcacgtggcttctccttccattctccaagtcgagaagagaccttagtttttctgcttctaactcatagtcctgcatgagggagagacatggcagaggggagattaaaacagctgagaagagacagacatgttcctgtaccccttcaggctgacccagacctgccctgtgccatgtgctggttttataatctgcgtgggtcttcctcacagctgcaccctgcagtgatttccaggaggttttgagaattactgatatctcagcagtacatagctccatcactcagtaacatatgagacaagaagtgccccctgaattcccctcccagcctttctacatgcctagagattttcacattctgctgctgcttttaacatcgtaccataaccctgtctcaccttgccaccacctcttctcatgtttaccagcttgctgactttataatccatcaggtggatgtgtgctgattcacgcagctttccccttccactggacaccagtcctttccagcgtactagttttgctattgtaaatagtgctgttgcaacaatgttgtttatcctgcatttttttttttgtactttttccttaaggataaattcccccaaagtgtttactgcttcagagtataaaacccttttacagcattccatgtctagtaccatgctgttttcccaaaagcctgtgccagtttgcacagcagccggcagtgcctcggatggccagctccacccccatgtgccagggccggtgcttgctgcttctctgaccagggcacggtggaataagacccctgctgtttgtgctttgggcggaagtttcccggctcacctttacagcttgctggtactgctgggaattggcacagatcttctgtacttcctgctccctacttgctatctcatctagcaggttctgtaagacagagtttaaaaatcaaaactaaccagaaaaaaaatttaaaaaagcaaccatggatgcagtagctggaaatctcagaatctgaatttattcttctctagcacaaagtatgatgaatggctcccttgtatacatttttattcattgcaaaaggcagtttttttgttgttgttgtttttttttttttttttttttttttttttttttgagacagtctcactgcatcgcccaggctggagtacagtggcgcgatctcagctcactgcagccttagcctcctgggttcaagcaattctcctgcctcagcctcccaagtagctgggactacaggctcctgccaccatacccagctaatttttttttgtatttttagtagagatttggtttcattatgttggccaggctggtcttgaactcctgaacttgtgatcctcctgcctcagcctcccaaaatgccgggattacaggtgtgagccaccgcgcccagccacaaaaggcagttctaaggctctgtgaagaagggccaagatcattatctctgctaggaaacaaatgtttactgatgatttggaccaccagacactgttctgctgtctgacttagattatctcatttaatcttcaaacgatgccaggaggtaagcatcgtgacctccagcttatgagtgaggaaagcttctgaggtggggatgtggctgatggggtggaccccggatttgcatctcaagccattggcttcccgtgttcctccctcacccaaagggcactgcgttgggcatgggggaggcaggaaccccaactttgaaaatgggatttcccccacaaaggcggctcctcattctgtagctgttcactcacatagccaacccacgccaagtgtccattctgcaccaggccctgtgcggggcactgagctgggagaggtgagcgacacactcggttcttgttctcagagggttgggtgttgggagcttgagctgaggcccagggaggacacagctgtggcaggcctctgccctgctccacctcccaaaggcttggctccccagaaaggggcttgttgacctctgaccctcccttgccagtgtgtgcctggggctgcggaaacggccatctcaccttctggttcttcagcttggtctccatctggctgaggctgtctgtctcctggggctcgtaactggggatgctgactaggaactgcagcacgtggtcatggccgcggtggaagtgctcgtaggctgccttggcgctctgtaggctctgcgccctgtcaaggcaaagcgttcaggcctcagccacagcaaacagatgcctcaccgagccctcatttttttttttaaagtgggaaacaaccaaatgtaacaaccagaaataccccaagtatctcccacacagggtgggtggtcattagggaacgtcaggttggactgtggagaaccaggtgggtccatatacattgacttgcagagatgcccattgtggattacaggacccaggtaagcatgactcaaaagagagaccacagggccgtcagagaatctgacgaactcaccaaaaagaaaaacagcaaaatctgtgggacacggctaaagcattgcttagagggaattagatcgcattctcagaaaacaaaaatggccaccacccaccgcaccctcacctgcgttccacctgctggcgcaggttgttgaaacgctggcccagcttgtgcacctcggcctcctggcgctccaggtccggacagtgctcctggaagcggctgggccagtgtgctcgagcactgcttggccgcctgcaagttctgctccacctcacccaggagggacttctgggcctgtaactcacagaccatggcctggcgggggcagaggaggagacggcggtgctacgggccagagctcccagagccaggcgatgacacccactgaagccccctgggccactgactgtaggagggtgggcaaggccacaggtaggaaggaccggagccttgctctgtacatcccaaacctgggtcacttctgccatcttctgttttttaacaatgaacaaagccctgaaaagctaacttctaaaaaccctgcagcaggcagctcgtgccctgcgcgagaacagcctgccactgtctggtcatgaggctgtggcaaaagcaagtcgtgagatgggagtgtgaataaggggcctcaggtcacagacttgaatgtttcctgtgctcaggcagtgtgggaagggggcccgtggcaactgcgaggtaagcaggccgagaaggcagctgctcctctgcccactgacttgccctctgagctgcagcccaggatgccagctctgctcagcaagagatactgggaacatggattgttatgtgctttatgcttttttttttttttttttttttttaagagatagggtcttgcaacgttgtccaggcggctggacttaaactccaaggctcaagcaatcctgccccagcctcctgaatggctggtgttacaggcatgtgccactacactggctattgcagatatttgatcttaaaatgctggcacccgaaatcccgtaagtcacacagatcccgtgaatagcttggatttgtgctgtgggcctccatttgcagttcccaatttgggcattccaaacctggggagactggatgctggtgtcctcatctatccagacgggcgggtggatgtgccagatgctctcacctgctcacagaaggactcccaggacttgggccctagactcaccgccagctcctgccccttgctgtccaggacacggctgctctcaggcactgtgtcatcctgattcagatggttctcgtgtgtggccagcaactcccagctctgctgcaggctcttctccaggcggttggccacatcaaccctgagagcaccaatcaggcgtcgggggatgcccacctggccccctgaccccaccccaacctccatgctgcctgtctgccacccacttctcctgggccaagtccagcagctgcaggaggtgctcgtatttccggttggtgtcctccacccgggtcctcagcaggggtgtggtgccactgcctgggagggcctggatgaaggcttcgccctcagccgtgctccgcgtcttctcaggttcaatccgcagtagctcgttggtgatgttctgtgggaaccagggcccctcagttttggacacagccaggcagccccttcccctgaggatgtgcccagggtgagcacagattcccacatcaggcacagtggaagcagctggagaggcctggcacattctggggctctgacccggcatctggaccccagcctgagggctgtatttttcacgagcatcccagggaaccgctgaggtggaatggactagtgacaccagaagcacccaggcagctgccgggcctgtgctgtcctcagcactgcacgcggacgcttctgtttaatctttgcggcaaccccgggaggtgagtactacgactccacccagtcacgggtgggggtgtgacgactcccagcagcttaggaagggacttgtggggtcaggctacacccgagaccggcatcctctcgccctgacttggctctcactctgaggccccatcaggggctatgggacttctccaatcccagatcctcttctgtaaaattggagtgctactcactgcctcagagggctgccttgaggatgtgggagactttgtataggaaaggaggtggggggaggtggcccctccacgtcccccctggcatcagctcaccctgtcctcgccactgccctgtgagcagggccaacccatcctactgaagacactgaggcctggagtttataaatacaaacgctaacgtgtttgcagtcaagccagccggtgacccagtcctgcggaattccacagcccatgtgccatgccaggcgtcagatcgacaagccgtgcaggaacaatgcaagtcctgccagctctttctcctggggaggtaatgacagcagccctgccacctccatgacttgggacccttttacatgcagcaggctgtccctgacagacagctgcagtgaatatcccaagactccatggggaaaagacctcaaataggggccccagggggccagtgcagggctcccccggccccacctgtgctcctgacccgcaggtaccttgaggtccttggcccgctcggcactgtcctgcacagcccggccttgctccagtggtggccgcaggatccctgtgatggccttctcctgccggtccaggtcgctggccaccttgtccaagccagccagcagctgccgcccctgtaggtcagaggcatctgtggagggagggaggacacaggcaggtgtgacaacgggccaggggtgtgaggcccagggatggacctaggcagccagccccccgccgtctcatccacagcacagaccctggtccagcccctcctccccggtacccccagagcctcaggcgagtggccctggcacccacctccgggattctcggtcttcagcacctcataccgctgctgcagcgtgcgtttgctcccagctgccttctgccgcacgctccggtactggctgcccaggctgtgaggacagaaatgagctgggaacctgggcagcccaccaccccctgcacccacagaggcgggactgcggactctggctgggcagacaccccagaggagcctgacagctccttagatgcggacagcaagtgctcactgtggcactggcctttctgtgctcctgggctcagagctcttctccctccttccctcctctttcgtaggaagtctcactacctaaaattgtctgtccaataatcaccaccaagatgttacttctgagggagcatacacagtaggtgctcaataaatacttaataaatgaaggcattccttgaatgatccactcattcagcaaggagttcctgggcacctactttgtaccaggtacttaactaggccctggagagaggaaattcaaggagcccaggcccaatgagactgacgcatacgctagtcacttaataaaaagcggtgcgtgcagtggaagaaggtgcctgggagcaaagaggaggcagcccttatcccagctgagtcctccagccaaggggctggggtctgcaagtacagggagcagtgcgtgcgggagtcaggggcccttagaaactgcttagaaactcgtgagggggccaggacgaagcccagagctagacattcatgtttagcaagtcagctggcccacaatctgcccctctcctgcatgaacttccaagggggtgcagatggagagtgtcagcgaccccgcgctccccacaggctgagtccaaatccccggggctatgaatggggcctgagaagccctgggggtgggactggtccatgcagactcccgcctttgcccttgtacctgtcagccagagccagggcctcagggtctgtgggggggatcacaaaacacacggccggagcaatcagcttgttcccagcgctgtccatgagctcccagctctccccgttgttcttctgcagggtgtagctgtagccccgcgagatcaggccctggcgggggcaggctggacagtcaggatcccggcagggcctgagggcctgggagcccggttgccatctcagcccccgactcttggacctggggagccccggctcatcacttggaccctccccgtagagtggggaggggcatgcaggagaagcacatgtgttgaggctgccggcccagcaacccacctccatttccctttggggaaccttccctcccaattcccagtccctgtggtctctccttctccattcccaagctccagatggacatgtgacttggacctggccaatgactggcattcgccagccacagtcattggtatagggtggaccctggcattccctggccacagtgattggtgtaggatggacacgtgactcacagtgagccaatgagaacctggcctgggacttctgaggagggactggggttgctaagctggtggaacacaaggccagggcagccgaggtgggggcggcataggggtgccagttggcctgcaccaggggaagggttggcagagtgacaccaaccacggagacaggcacaggctcctgagaacggcgcctgaggcccgggatccaaccatgttaccccaaaaactttgtagtgatgtgaacagaggagctggccccacgcacctgctccccctcaaagtcacagagtgcctccacggggatgggcttgagcggagtctcccggcggtacttgaggggcaccacctgctggcctcgcttctgcagcccctgcaccacgtcctcatacttgtccagcaccttctcctggtcctggagagaacggggtcaggggcccaggtgagaccaacagccttccccctggtgggaggacgcagagcaggggctggattcagcaggtggggtgctgtggaggggcctgtacagggctgagggcaggcatggtgtagaggggtcccccgccccccgggccagcaggggtcctgggccatcgctcacatccagctcccgcagcagcagctcaatctggtaccggtccttgaagtcagggccatacttctggttcaggtccgagtccaccttgcgcagcagctcctgagcgtccttcacgtcttcgtgaaactaggggagaaggtggctctgttacagccaggaaaccactagaagcacctgggcttctgtcggaggcttcaagctcatccctcaggcggggctgggcctccggttcacctggagtccagcatgggaccctgtgctgagcctgaggctcctctgcgtggagacagccccaccctccctgagctggctccttaggggcctcactgggaaaagccaggtcccttcccacccatccatgagatgccacctctgtgacatgttttcttggatgtatcagtaagtcttgaggtgtctttgattcagttcctctctctgtactaggaacatccagacttaatactatagcttctttctaggttttgataatagcctcccctttttgttctcgaaaattctcttgcccattcttcagtctatcaactcttggttcactgtcagctatcccctgggctgagcacctgggctgcagccataaacaggacctgaagcccccactgtgcggctcagacagggaatgaggagtgacacggcgtcgcccacatccagctttccccagacacctcaatcctaagaattacccgcagcttcttaagaactctcattcctctggaaacagacaagtgtccagccacagatgagtggataaacacagtggtctagccatacaataggatatgattcagccataaaaaggggtgaagcactgaaaatgctacaacacggatgaacccggaaaacatgatgctcagtgagagaagccagacacaaaagggcagagattgcatgatcccactgattcttcatattcgttctaggtgtgacacttctggaacaggcaagtccatagagacagcaagaagaccaaaggtgacctggggctgggggagtgggaatggaaaacttactgcctaatgagtacggggttgttttttttttttttttttgaggcggagactcactctgtcgcccaggctggagtgcaatggcgcgatctcagctcactgcaacctctgcctcctgggttcaagcagttctcctgcctcagcctcccatctgggactacagatatgggccaccacacctggctaacttttgtattttagtagagatggggtttcatcatgttggccaggctggtcttgaactcctgacctcaggtgatccagtcgcctcggcttcccagagtgctggaattacagacatgagctaccgtgcccagccagggtatagggtttctgtttggggtgatggaaagttttgcaagtagatggtggtgatggttgcataacattgcgaatgcaatgaatgccactgaattgtacacttaaaaatgcaaactggccgggtgtggtggctcacacctgtaatcccaacactttaggaggccgaggcgggaggatcacctgaggtcaggagttcgagaccagcctgaccaacatggcgaaaccccatctttactgaaaatacaaaaattagctgggtgtggtggtgggcacttgtaatcccagctgttcaggaggctgaggcaggagaatcacttgaacccaggaggtggaggttgtagtgagccgagatggcacgactgcactccagcctgggtgacagggcaagactctctcaaaaaaaaaaaaaaaaaaaaaaaaggcaaattttgttttatgtatctgcatgtatattatagattttaccaaaattaaaaccctacacactcaccctgggccccatgtgacctggggaatcagactctggccctggtccccagggaagttggacaggggccggcaagcttgggacatgtctgcacacgccatcagaagcatgggtgctgggggcctgggatggctgccccgcaaggctcctggaccaaggagcacgaggccacacatgagccaggtaggcactgagcgctctcagagagtagcacccccggtgctggggggactcccaggaaaggtaagtacctggtggtagtcctccatgtacttgaggtggctctcctcgcagatgagcaggttcaggtactccttccagtctgcgtgcacagcctccatgtgcgcctgccaggaagagaaggggccggtcaccactgggcaggtactgcagacaccaagggagggactgctgggatattgggctggggcatggcgggggagggaggcatctggcatctgtctgggtgtggctaccacaggggtagccagcttctgctcaggagtgggaggaggagagaggggtcacgtcaaggagccaaacagggatgccacatacggatgcccaggctgtgcagtgcacaaagggcaagtgggggctgtggtgccttcggcaaatctgtacaaaggcactgtcatggaccgaacagtgtcccaccaaatccatgaccctggccaggcatggtggctcacacctgtaatcgcagcactttgggaggccgagcgggtggatcacctgaggtcaggagtttgagactagcctggcccacatgatgagaccctgtctctactaaaaatacaaaaattagctgggcatgatggtgtgcgcctgtagtcccagctacttgggaggctgaggcaggagaattgcttgaacccgggaggtggaggttgcagtgagccaagattacaccatcgcactccagcctgggcaacaacagcgaaactccatctcaggcggggttggtggcattgtgggggttgggaagaatgcgaccttatttgggaataagatctttgcagatgtcattagttaaggatcctgaaattagggtgagccctaaatccactgactgatatccttataagaagagaggatacagagagacatggggagagaaggccatgtgaagacggaggaagggactggaatgatgcagccacaagccaagggctgttggcaacccccagaagccggaagagcaaggaaggcacatgtcctggagcttccagagggaatgaggccctaagacaccttgatttcagacttacagcccacagacctctgagagaatgaatttctgttgtttaaagccactaagtttgttttaacttgttgcagcaactctaggaaactaatacagaccccacaggggcttcagaagtccaggggctgagggcagaagtgtcaacggatcaggataaatggaggaggcagagtcagacacagcaagaaagagacagacagacacaagatgcagcttgcaggacccccagctccggggtctgcccgagctccaggcggcccacaggcagcggccaaccagaagccaccctgggggaggtgtctggtctcggggtgcatgaacctcaatggagttcctcccggggtgctcggccgccagcagctggtcgccctcgctgtgcagtttgttgattctctcctctttggcctccaggttccggttgatgaaattctgcagtggggggcagtggaggggcctcagtgcccagcctggcggtcccgtgctccttccagggctgcctcctccctgatgccccaggcccccagaacccacctcatactggcgccggcggctggggtagtcgaggttgcggtcactccagtcgtactgcatgcggcccttggcctgctggtccagccagtacagctcattggtgcagcgctgcatgtagtcctgcagcgaactcaggtgctgctgccgggcctgtgatgctgcctgaaggggccggggcaaggaaagggctgcgtcctcagcccgctgccactgctcgcttccttccctacctcctgcagggcccagctatggctggcctgaggacaagcccagctatgggtggcctgaggacaagcccagcttagccacgtccaggccagtcccccttagacaagtcacctgaacccctgaaactc

SEQ ID NO: 2040 - protein, 1161 aa, Homo sapiens
MENFLPDFLSCITEDSPLGPFTEISSQSHSWLLSFTNMFQSMSPARWASSGDSSRPVSGWMTTMERRRWFSRCSRLTATEPRRFCSSSISRSLSLESLLRSSSSLSRDHSLESWLVPESATVMFRRSRVSVAAMLISDWSLRVSSCRFCLSSCNLWFSSLRKSSSLDDLELWNSSSESLASSRLTSTSSSRLLRLSSSRLLLSLWISCSVSPFSTWTLSESTTFSLTSAFSSAASFLRRVSSSPSRSCRRCCSSSSWSRSRACSRACCGSCCSTTFCVWVTFSRASASSCSSAASRCCNRCTSRSASLRACRSRSSSSSCRSSSVRRRCSRRSSARSLSICRSSTSMLSAKALASARRPGSSSYLTTSCCTTLSFTRESSSSFRAICSSWEALSLSRSTCFFCSSESFALRDATSSLLRSCSSAPRYFRSCSTSSRRRFATSLSALGSGRTISRTFSCTTTLAFSSSKAHIFRSSSVFSLWLARALAASSSYWRVRSLTSLSVAASFSTLSTSLTPLELVLEEAQLLLLLLPELVLALVVLLQLLVLCLQLGVILQFHHLFLCDLLLRPALLFSQGGHTLLQEEHLCLPGALLPPQCLQLLPQLQDLIRLGPVRLDAQDLLDHVLLPPVSGLLLQGTQLQLQCLQLLLQQLVLVLLLCQRPLQLLEALLQHGIRHLLEHLLPHHRFLRPLIPQGPDFFLGALDLVLQLPPPLSLLIQFLPDLPRLLHSRVRPIPLQGLMGHFYFRLLKQKWPPPTAPSPAFHLLAQVVETLAQLVHLGLLALQVRTVLLEAAGPVCSSTAWPPASSAPPHPGGTSGPVTHRPWPGGGRGGDGGATGQSSQSQAMTPTEAPWATDCRRVGKATGTLRSLARSALSCTARPCSSGGRRIPVMAFSCRSRSLATLSKPASSCRPCSTDPGPAPPPRYPQSLRRVALAPTSGILGLQHLIPLLQRAFAPSCLLPHAPVLAAQAGSWAIAHIQLPQQQLNLVPVLEVRAILLVQVRVHLAQQLLSVLHVFVKLGEKAAANQKPPWGRCLVSGCMNLNGVPPGVLGRQQLVALAVQFVDSLLFGLQVPVDEILQWGAVEGPQCPAWRSRAPSRAASSLMPQAPRTHLILAPAAGVVEVAVTPVVLHAALGLLVQPVQLIGAALHVVLQRTQVLLPGL

SEQ ID NO: 2041 - DNA, 3801 bp, Homo sapiens
  source
  (1)..(3801)
  CDS (201)..(343)
  CDS (375)..(561)
  CDS (650)..(1069)
  CDS (1336)..(1485)
  CDS (2371)..(2549)
  CDS (3412)..(3601)
  modified_base (26)..(26): a, t, c, g, unknown or other
  modified_base (250)..(250): a, t, c, g, unknown or other
  modified_base (274)..(274): a, t, c, g, unknown or other
  modified_base (880)..(880): a, t, c, g, unknown or other
  modified_base (1034)..(1034): a, t, c, g, unknown or other
  modified_base (1137)..(1137): a, t, c, g, unknown or other
  modified_base (3275)..(3275): a, t, c, g, unknown or other
  modified_base (3277)..(3277): a, t, c, g, unknown or other
  modified_base (3282)..(3282): a, t, c, g, unknown or other
  modified_base (3285)..(3285): a, t, c, g, unknown or other
  modified_base (3289)..(3289): a, t, c, g, unknown or other
  modified_base (3292)..(3292): a, t, c, g, unknown or other
  modified_base (3300)..(3300): a, t, c, g, unknown or other
  modified_base (3302)..(3302): a, t, c, g, unknown or other
  modified_base (3340)..(3340): a, t, c, g, unknown or other
  modified_base (3362)..(3362): a, t, c, g, unknown or other
  modified_base (3390)..(3390): a, t, c, g, unknown or other
  modified_base (3397)..(3397): a, t, c, g, unknown or other
  modified_base (3457)..(3457): a, t, c, g, unknown or other
  modified_base (3519)..(3519): a, t, c, g, unknown or other
  modified_base (3545)..(3545): a, t, c, g, unknown or other
  modified_base (3624)..(3624): a, t, c, g, unknown or other
tattcagtgccttcagtgattatcanattagtaaaaaactctgagctgtcggctgttgtgtcggcgtgtgtcgttgcgtgtcgtctcgtgaggctcgtccgtgctgtggtctcgtgtgttgtgtggctggtcgctgtgtctgggtgcggttcttggcggcgatgtgtggtggtggtgtgtgcgtgtagtgtgtggtgctgatgtcgtcggcgtctcgctcgctgtgcggcgcagtcgctccgtggtgttntttgggtgccgtctccgagttgtncggttcgctgttgagtgagtctgtggtgctcgatgtgttgtttgttgatgatgctgtgttgtatgtcgcgtgagcgtggagcgtcgttgtgctgtggtagctggcgtgttgcggtgtgggtgtgttgtgtctgcggcttggtgcgcctgttagttgtggtgtgggtgtgtggctttcgtttgctgtgtgctgtgcctgtggtgcggtgtgggcgttgggtgtgtgtgctgtgtggtgctggtggtcgtctcgttgcggtcgtgtctgtggtggcggttctgcttgcggtgggtgtgtctgttgggtgggttgcgtgcgcggctgtgttgtggtggtggtggtggttgtgcgtgttggtgttgtgctgtcggccagtctgtgtgctcgtgtgttcgcgtcgtcgtcgtgagctgctgtagccgcgtgatcggtgcgcgtggtggttgttgtgtgtgcgttgtgtgcgttggtgtggtgcgtggtgtgtgggtgtgtgttgggtgttggggggtttggatcggggtggtggtcggtggctttgtgtgtgtcgttgcgcgtggttggtgttgggtggcttgcggtcttgtctgcggtgatgtgtgttgnggggtttgtggtctagtggttcgtagtgtctgtgtagtgttgcggctcgtgttgtgtcctctgtgtgtgcggtgtgcgtgcgggcgcgtggtagcgtgttgcgtagggtgtgtgtctggtgtgtcaggtgtgttgtcggtggtgttcgcgttgngtgtgtgtgtgtcgtcgtgtatggagtgctgtgtggtgtgcgtatgtgtgtagctgctatgagctgcgtgagctgttgtagtgtgttagtgtgcggcaggagngttctgcgctgtgagtgtggtttgtggtgtgtcggtgttagtctgctggtgtcgtgctgtgtgttgtgttcgtggtgtgggtgggtggtgtgtcgtcggttgtggtgtgctggtgttgtgtggtgcgttgttgtgggtgaggtgtacggtgtgtgtgttggtcgtgttgtgtcgtgttcggtgcgtggtgcgttgtaggtgtgtggtgctagtgtgttcgtctgtgctgcgcgtcgcctgtttcgtggtgggttggtgtgttgggtgtgcggtgcgtgtgctgtgttgtctgtctgtgtgtggcggtgtgtgcagtgcgtgtgcgtgtggcgtgtctgtgcagtgcgtgtgcgtgtggcgtgtccgacgtttagccaaaaccctcatcatctctgccccctctgcaaatagagcccagccttctccatggtggtgaagacgccagtgtgactccacgacgtactcagcgccctgaggtcaggcacggcagctcacacctgtaatcctagagtttgggaggccgaggtgggtggatcatgaggtcaggtgttcagaccagcctacacttgtgaaggtagcattacatattagcagattatcaaacatgaggccctcctcaggggatctcttggaatcccacagtttatagttcattggtcagaagatcagtggaaatctgggacttgtgactggcacctgcagtgggacagtggctaactgatgtgctgtgctatctgatgatgtgtcagactgaccggccttcatttacacagcaagccttcctttcaggaacggctgcaaaacggaagcctaaaacagtagatggtgacagaatggtattgttaccagcagggaaatggcaagctcgccccctggtgacagctggggagacacagaaaaagcaaatttttttttttttttttttttttttttgagacggagtctcactctatcgcccaggctggagggcagtggcgcatctcagctcactgcagctccgctccgggtttcagcattccgggccaaggccgaggtgctaaaaaattcgagcccagcagctacacaaagaacagcagaaaggtgtccaacccttaacatttgggtaatgtggtccaccctcccttcccagggaacaatctgcttgaggcttggcaggtcctcttcttgaagcttgactgcatgccttgaagtgcaccttcgtggagattgagaaccgaatacgactcactatagggcgaattgggtacacttacctggtaccccacccgggtggaaaatcgatgggcccgcggccgctctagaagtactctcgagaagctttttgaattccgggccaaggccgaggtgctaaaaaatcgagcccagcagctacacaaagaacagcagaaaggtgtccaacccttaacatttgggtaatgtggtccaccctccctcccaggcaacaaactgcttgaggctggcagctcctgtttctgaagactgatgcagcccttgaaggtcaacctgctggagcaaaaaaacttgggacttgaatttgtagctccatttacatggatccattgccccagctactggagtatagcctacaatgtttatttcagtcaatattcctttatctgggtgttctgtacaatgtttattacagtcaatattccttcatctggatgttctgtgaagatagccatgtttatgggggtcttagttttcaaactctggcaactctgtgaaaaataggagcaaactagagagccctggagattggtagtagggaagggaggatagcaggaagtttgaaaaattagcaaccccggggcctaaaggaatcagctgtcatcattttcatcattaataatttgccgggtcggtctttgcaggccagtagagcagtgatgtctgtgattgaggtgttagaaatatccaagctctctaatcttggcaatgaaggcaacttcagccaggtcttcattgtaaaagagaacattcgtgatgcttaaagctcgaaggccagaaggcggctgaagcagcgctcgtaaggatcctcgagggagagagttaatgaattcaaagctctcgagagtactctagagcgcgggcatcgatatgactgcagtgagtctacctcgcctaaacgtcacgtncnttacncanatcngantacaacangnatctagatcgaattcgagcacacattactcgtgtgtanactaagcgtgtcatctactagntctgcatgtcattagcatcgatcctcgngtactcncgtgtccatctcagtctcggtactacgtatcgacctatctgcattagtacatacgactanagcactgcatctatcgtatgtgcgtacgctcctagataccgcgtcgtcatcatagtcttcgnctcgcgatgtgacatactagtgctcntcactgtacgacgtcactcagtcggatgtcgattactcgcatccgtactactatagtcgcgtctaatctagtctatgcnactgcgtactactgcctgtcactgctcgtaatcactattctgtatatacctacatgactatcagatgtaacgacagtcgtcacgcacctgcagatacttctcactgtagctatgacactgctactctgatcgttgctctacatacatatgacgatacagtcacgtgcgtacgtcgtc

SEQ ID NO: 2042 - protein, 422 aa, Homo sapiens
  MOD_RES (17)..(17): Variable amino acid
  MOD_RES (25)..(25): Variable amino acid
  MOD_RES (187)..(187): Variable amino acid
  MOD_RES (239)..(239): Variable amino acid
  MOD_RES (375)..(375): Variable amino acid
  MOD_RES (396)..(396): Variable amino acid
  MOD_RES (405)..(405): Variable amino acid
MSSASRSLCGAVAPWCXLGAVSELXGSLLSESVVLDVLFVDDAVLYVAWRVAVWVCCVCGLVRLLVVVWVCGFRLLCAVPVVRCGRWVCVLCGAGGRLVAVVSVVAVLLASVCSCVRVVVVSCCSRVIGARGGCCVCVVCVGVVRGVWVCVGCWGVWIGVVVGGFVCVVARGWCWVACGLVCGDVCXGVCGLVVRSVCVVLRLVLCPLCVRCACGRVVACCVGCVSGVSGVLSVVFALXVCVSSCMECCVVCGASVFVCAARRLFRGGLVCWVCGACAVLSVCVWRCVQCVCVWRVCAVRGELGTLTWYPTRVENRWARGRSRSTLEKLFEFRAKAEVLKNRAQQLHKEQQKGVQPLTFGLGTTYRPICISTYDXSTASIVCAYAPRYRVVIIVFXSRCDILVLXTVRRHSVGCRLLASVLL

SEQ ID NO: 2043 - DNA, 10033 bp, Homo sapiens
  source
  (1)..(10033)
  CDS (201)..(267)
  CDS (1110)..(1244)
  CDS (1742)..(1902)
  CDS (3203)..(3342)
  CDS (5266)..(5414)
  CDS (5495)..(5791)
  CDS (6598)..(6796)
  CDS (8013)..(8879)
  CDS (9542)..(9833)
  modified_base (3973)..(4072): a, t, c, g, unknown or other
  modified_base (9980)..(10033): a, t, c, g, unknown or other
tgatatccaaccaaggtagagtcacaggtgaagtggacagctcctgatactcctctacatgttcacatgttcacagccatctctaatcctcttcctgtcattcttttctccacgtcctcccttcccccagcaaagtccaggttctctatggggggacagacctgtttgactatgaagtgcgcaggacgttcaacaatgacatgctcctggccttcatcagcagcagctgcattgctgccctggtctacatcctcacctcctgctcaggtagggcttctctcaagccagccccctcctcccctcccagggtgctcctgtctgcccagagcctgccttctcaagaatgctgcaatactcttgagcccagcatgtcagagctggggacacagggatatgcacacaaatcatcttccaaccccaaacaggcagactgaggcctggaggcaggttgggctgtaccagcccgggtcacaccctctaccctgggcccctgcacagttggaccttttgcctgttgaccatctttctcctattgatagccttgtgctggggagtctggggtattgtattcctttgtggattactttgtagcctattttggagtcccaagtcaactgccatctgctccccgatcactttttcacctccgtgtgcccctggatactagctgctgcttactcctgtctgtatacagtaggcacactctactgcccaagcagacaagacaatggtaatactttccaaaatggaaaagacattcattcgtccatacaacagatatttactgggcaccaaactatatgccagatgctgtaaggtgccagggatccagacacagttcctacccccaggtaatatgtaatgttcacaaggctcttgaggtaaggtctgcaaagaggaggacagtctgccacttgggcctcctgcccggtgccctttttgggtgtggaaaacagaattggccctgtgcctgtgctgggaacagagtggtgaatggtgaccagggttggggagaagagacaggacccagctgaggtcagggactctagtggggtttgagtcccatgagggtccccccaccgtctccctgtgtctcttaccctgcccagtgttcctgtccttctttgggattgccagcattggtctcagctgcctggtggccctcttcctgtaccacgtggtctttggtatccagtacttgggcatcctgaatggggtggccgccttcgtgatcgtgggcattggtgagtcgcctctgttgtcatggcagtgcgcctcccacatgggaagtctgccccatcccctttctccctggatacaaagcctggcttccctgggggctctacacagcgcctgctgaggcctagagccttggagtgcagggttagaatgtgggtggtgggcggatccttggcatagggtgagtggagagagcaggaaggtttgctggatggaggtgaggatggtgggaaaggcccaggaagtgtgggaaggaggtcaggatgtgggggaaggcgcctagctctgggtgaggttggggccaaggagtgtggtgggtggggcttgaactcttggtgggaggagccaatcagaggggtctctccaaactgtaagctcagaagcaggactcctgcagcctgacctcccaggaggccactcacacttggtctagggccaggttgggcctaatcctggagacagcagaataatcctgagcctggctggggactccctcccacaggtgtggacgatgtctttgtgttcatcaacacctaccgccaggccacccacctggaagacccacagctgcgcatgatccacaccgtccaaactgcaggcaaggccaccttcttcacctccctgaccacagccgccgcctacgcagctaacgtcttctcccaggtgcggacctgtcctccattcctgtcctggcctcccacacgctcatgcatacctagccgctggtctctgcccttcccaccaccgcttgagtggccatatagccttcacctcaaggtacttgccctggctctagagttcatttttgtcacgaatcacccattacccaaacttaacaagtgggaatattataataatccagacagcatgcattagggatcctcagtagtagtaatccagcctccaccctggaggacatttggcagtttccaaagctctttctcgtttaatcttcattaccacggtaattgacaaaggtacaattaccatcctattttccaaaaaagaaacttggcccctgagaggtaaagtgacttcctcaggatcacacagcagataagtgagaagcctgaccaagtccatagtgattccccttctgcctgcttctggctgcattttcctcccttgtgctgacttcctcttgctgcctctgagtggggcttaggagaaggcattgagcccaggctgggtccttggtacagaaagacagtgaattggcccaagtctttgagaaactttacgacctgggctgagtagcccctctggaaaccagtagatgctttaggattatccaggtccttctagagaatcacttctagaaggtaggcagagctgggttcagcttctgcagtgtgaccttgggcaggctgtgtgacctctctgagcctcgctttcctcatgtgtggattatccagggactgagatgcgaggatgattgtgaaagtgtttcacagagtgtaggctgctctgttggtggctacagcttacttccaactagcacctccctgtgtggtccctgtcatacttctggaacatacccattgctcctagtccccagggtccctgccttcgtcatgtggcagcattctctccctccccctcactagcacatggcctggtctagcgggatgtgtcttcctctgtccccattcattcgcgtaatgacagctactgaccactgcctctgtgccaggcactgttctgggcagtggactgcagatagacaagagcctccacttgaggtggggacccttcctgtgctgctgtgtcctctgacaccagcccttggctcctggtgtcctgtgaggctagtgcctggcattctggcagcctgggcctcctcctactgcctcagtctgggccagatctggggtcctgagtgtctctggctgcagggggcacccaggccccctgactgcaggtccaacctgtcccacatccctctcttcctttccatcaccagatcccagccgtccacgactttggcctgttcatgtctctcatcgtgtcctgttgctggctggccgtgcttgtcaccatgcctgcagctctgggcctctggagcctctacctggcaccactggagagctcctgccagaccaggtaagtcgggcagggcctccacccacagcagggtatccacaacaggcctctatgagccactcagtgcagcaacctctcttccaaaagccttctgtatgaccagtcctttgctaggcagggaacagggaaggagaagatgcttccatccaataactgcaatttgggatcaccagtgtcaccaggaagtgagcaaagcacttgtgtccaagatcttatgacatcaccattcacttcccaaagaaccctgggagctgggttctcttgctgtgcccattttacagatagaaaacaatgactcagggaggttgggcagctttttcaaggtcacctatttagtaggcagtagagcctggatttaaacccaagaactctgcttccagatcccatgctcttagccaccatgttaagtgtcctcaggttctcatctttagatgtagtgagacgtgtgcagagttgaacgggtcagttcagagttgctgctggaggtttagggggaaagaccttgtgggcctggtggttgggaagatggaggtggatggtggtgaagttgtaatcagcgcctgggtgactgtcctggggttgggagcatgcagggtctctgggcttggaacagggcccactcagtgtggannnnnnnnnnnnnnnnnnnnnnnnnnnnnnnnnnnnnnnnnnnnnnnnnnnnnnnnnnnnnnnnnnnnnnnnnnnnnnnnnnnnnnnnnnnnnnnnnnnntgggtggctgcctggggttgggaggatggagggtctctgggcttggaacagggcccactcattgtgataaaggccttggtcagtcgtgttcagggacccatgacaatgtccgctcgcccatggtgagccccagaggggctggagggagagaagggcccagcgaggagcttagacttgggcctgagatggactcctcagctctccccactcacatcttcacccttcaggaccccgctgtggtggtgcaggttggcactgcacacaggtgccccggcggaggcactgctctgtgtaccatgggtgctcagatttgactgttttccgtgacagtttcatgatatagaagcagcgtcatggggaaagggcgccttttctgatctctacagagatgcaaaataagccccacgtctgccccccggcctggggctgtctccccagtggtcctattgggcacagtcgtcttcccagtcagtcagatgtgggcttcaagcccagcctcctccctcggcagccatgaaaccctggacaggtgacttcacctctgcatctcagtttccttttctgtgaaatggttgtgatgtcagcagcactgtgatacctgggttcatctgtgtgtgagtcccatgaggattaagtgagataatccacgcagggctcccagctcactgctggcacgtggcagtggtattagccacacacacagcgctcgtatcagccgtgaggattattctggtgcccagtccctaggttgagccgcgtctctcatgtgttcactccagctgagacctcggccacgcagctacaccctcagcccagccctgttccctcctcctggctcccctgagtattaagttggaggcagagcccctgggccacacagcagcagaggaatgagtcccctgatttgatcaccttagtgcccgggccactgtgtgttgtcatcccctcttcctgggtaatgtttgctgtcaccatttgtctctctggaggaagactggcacctgagggccctggggtagatggtactagaaagaaaccaggtgaccagctcccagaagtctggggtgctcatcctgtgtgtgacgtcagcagcactgtgatacctgggttcatctgatcctcaggaccctgccccaccctccctgggtacccaggaccctctggttcacccctgtcccctactctctccacagctgccaccagaattgcagccggaagacctccctgcacttccccggagacgtgtttgccgctcccgagcaggttggaggcagccctgcccaggcccccataccctacctggatgatgacatccccttgctggaggtcgaggaagagccaggtgagagctggcacaggcctgccctactgaccccagtgagacccagcgctgcctctgccaggggagtaacacttgacaagttggtcctgaggctgggggccggacaagatggcctgtgggcttcctcaccaggcatctgggcttccctggaagcgagcgtggaccacagtgggctttgattcaggctctgacgggccactgctctgccctggcagtgtcactggagctgggagacgtgtccctggtgtctgtgtcccccgagggtctgcagccagcctccaacacgggcagccgcggccatctcatcgtgcagctgcaggagctgctgcaccactgggtcctgtggtcagccgtcaagagccgctgggtgattgtgggtaagtgggccctccggccctgccccctgtctcacagctccacccccaaaacacacaggaactgggagcccaccccctctcgcagatgccccagggtcagaggcctgggctggggtctctccctctctgaccccccctctttcctgtgcagaatgaagccggtcatggcggctgttactcattggcccctgctgtgtgccagccactcacactgggcagtagcacagagcatgccacacatgggccctggagttagacccacttgagtctgagtcccagtttggccgcgtcctagctgtgtgaatttggctattccagtccgtttagcactcagttcctattctgtaattgaggatgagaacggtggctaggaaggcagctgtcagtggagagtatgtataaagacctcagcccagcgcgtggcgtgcggtaagtgctcagtgaatgtcaagtgctattatcattgtcatcttcgacactatttcagagttgtgtgagatcaagtagtgcaccagctcgtcataaactatgaggtgctctgaggtggtggccgcctcttgtccaggagtattagattatagcttatagtcaaaccccatgggacaccacaaagcaactgatccctggccctgtaggaccatccccagcaagctttgcccacgggctggcatgcagggccttcccccgcacccttaggacacccgccccccaacaaccagagcagttgtctcccggcactttggagccccactgggaacagaccagctgggcccagccccgcctggtgtagcgccctttcctcacagggctgttcgtctccatcctcatcttgtccctggtgttcgccagccggctccgccccgccagccgggccccgctactcttccggcctgataccaacatccaggtgctgctggacctcaagtacaacctgagcgccgagggcatctcctgcatcacctgttcaggtgaggcttctagccaggctgtccctggcccgctcaggtgtccgggtcccaaagactgttggtctgagagatgcaggatccagggtccccatcaatgccagacctcaggcaaatcccactcccctctgagcccccatgttcccacagttcattcaacagatgcctgctgggtgcctgctgggtgctggctctggggaggtactgtgggcgggaggcataggcttcccaagctcagggagttcacattccagctctagggcccggtcactgtaatagtagatctgagctttggcggaggaagaatagggtgtcttagaggcccacgtcatggaaggcttcctggaggaagtaacgtctaggccacaactcacaagaattgggaggagttagccaggctgggaggggagaggaggaaagaagaggggtcaaccaggtggggaggggaaaggagggaaggggtggggttaaccaggctgggaggagaaaggagggaagaggaggggttagccagttgaggaggggagagagggaaggggtggggttagccaggctgggaggggagaggagggaaggggttagccaggctgggaggggagaggagagaagaggagaggttaaccaggctgggaggggagaggaggcaggagtctaggcagaggagagcaccagaggtgggaaagaccaatgccacatttgagagaggcagctgcaggaactaagtctggcccagtggactgggatagggcagatgggctgaagtgaggggtctggattttattctgattgtcactggaagctagtcacgtggtttaagtggagaagcggggtgagggagtctcccaggtgctgtgtggaggtggactagggcactggggtggaagctagctgggaggctgagagttggtggtgctgggaccagcatgctgatggcagcgatggtggagtcaagaggtttttaggaggtggtttccataggacttggtgacggagtgggagtcgggaatgagccaggagggaagacagagatggctccttgattttgaggtagctggcccaggccgcattttacagagggggagcaggcgaagtcaacccaaggtcatctgattttgccagggcagttagaaaccaaatgagaagacgcctgggtgagtgcttccagctcacaggagcagatctgctggtgctgtcattacctttatttaattagggcggtgctgagatcaacctggccttccccttggtaatggcagccaaatgcgtgataatccactgcagctccgagaggcaccagaagagcccctcacacttcggagccagccctggccacgtccccagctcctctaccccactgccaggatgtggcattgctccccatcatcaccgccgccacaggcctcctgcccacagatggacaaaccccgaagctccctgacaacatctggggccaggacccagccagagcccagccaggacccagccagagcccagccaggacccagccagggcccagccaggacccagccagagcccagccagggcccagccagggcccagccagggcccagccagggcccagccagggcccagccagggcccagccagggcccagccagggcccagccaggacccagccagggcccagccagagcccagccagggcccagccagagcccagccaggacccagcgagagcccagccaggaccctagccagagcccagccagggcccagccaggacccagccagtacctagccagaacccagccagagcccagccagagcccagccagagcccagccaggacccagccagagcccagccagagcccagccagagcccagccaggacccagccagagcccagccaggacccagccagagcccagccaggacccagccagagcccagccaggacccagccaggacccagccggagcccagccagagcccagcccctactccctgtgcctcttcctctgggaactgcctcttggagggaccccttcagagtacagcagagtgcttcggctttacaaagggcaggcgaggccagaacccagcggggctgcaagtccctccctgggcaggtcctttcacctctgctttccactccatcaagtgggtttcatgggaacagcctcaggatggctgtgaggattaaaactttgaaggtgtagttctctcatttctaatttaaaaaacccaaaggaagggctaacacacaacgcttgaggcaaaacaggaatatatgtctcccaccatgtctgccagctgatgaccttgggtcactctaacagtcactcctgttaattggatgcagaggatgtgatgtcccacccccgagggaagtgtggcatcatctccacccgacagaggcggcagagtggcacagagagggtgagcacgggggcagagtggcacagagagggcaagcgggggcagagtggcacagagacagcaagcagggggcagagtggcacagagagggcgagcagggggcagagtggcacagagagggcgagcagggggcagagtggcacagagatggcaagcagggggcagagtggcacagagacggcgagcagggggcagagtggcacagagacagcaagcagggggcagagtggcacagagagggcgagcagggagcgtttcagtgtttttctctgggcaggctgatggtgcctttctctgggcctaaaattcctataaatttggtatttgattttttaaaagttctttctagtttctttctgacccctgacacccaccccctccagtccctgggccccagttcctgagactgtctcagatcccagcctcttccctctgcccatcgggcccaggccaggatgtcctgctgtcctgctgtccttgacatggcgctggggggcaggtctgttccaggagaagccccacagcctgcagaacaacatccggacgtccctggagaagaagaggcgaggctcaggggtcccctgggctagccggcctgaggccaccctgcagggtgagcactgggggtggagggtggggaaatcctccctggtgctagggttgagggccctgtaaggagagcagataaaattccttctggattctccttcaagaaggagattgtgtgttcctggtcactgcagaggagctggggatggggggtgaatttggggccctcaccttccatccccccaggacactccgctcccccccacaccctgnnnnnnnnnnnnnnnnnnnnnnnnnnnnnnnnnnnnnnnnnnnnnnnnnnnnnn

SEQ ID NO: 2044 - protein, 768 aa, Homo sapiens
MLLAFISSSCIAALVYILTSCSVFLSFFGIASIGLSCLVALFLYHVVFGIQYLGILNGVAAFVIVGIGVDDVFVFINTYRQATHLEDPQLRMIHTVQTAGKATFFTSLTTAAAYAANVFSQIPAVHDFGLFMSLIVSCCWLAVLVTMPAALGLWSLYLAPLESSCQTSCHQNCSRKTSLHFPGDVFAAPEQVGGSPAQAPIPYLDDDIPLLEVEEEPVGPEAGGRTRWPVGFLTRHLGFPGSERGPQWALIQALTGHCSALAVSLELGDVSLVSVSPEGLQPASNTGSRGHLIVQLQELLHHWVLWSAVKSRWVIVGLFVSILILSLVFASRLRPASRAPLLFRPDTNIQVLLDLKYNLSAEGISCITCSGEASSQAVPGPLSQMRDNPLQLREAPEEPLTLRSQPWPRPQLLYPTARMWHCSPSSPPPQASCPQMDKPRSSLTTSGARTQPEPSQDPARAQPGPSQGPARTQPEPSQGPARAQPGPSQGPARAQPGPSQGPARAQPGPSQGPARAQPGPSQSPARTQREPSQDPSQSPARAQPGPSQYLARTQPEPSQSPARAQPGPSQSPARAQPEPSQDPARAQPGPSQSPARTQPEPSQDPARTQPEPSQSPAPTPCASSSGNCLLEGPLQSTAECFGFTKGRRGQNPAGLQVPPWAGPFTSAFHSINPWAPVPETVSDPSLFPLPIGPRPGCPAVLLSLTWRWGAGLFQEKPHSLQNNIRTSLEKKRRGSGVPWASRPEATLQGEHWGWRVGKSSLVLGLRAL

SEQ ID NO: 2045 - DNA, 3605 bp, Homo sapiens
  source
  (1)..(3605)
  CDS (201)..(296)
  CDS (2168)..(2565)
  CDS (2604)..(3405)
atgtgaaatccttttcttttgtaccgtgttcgctatgccagcggctcagaagagcaagaggagccctgacccgccactgctttgtctgtggagtgggttttgagggctggggaatggctggatgacccccctctcttgaagatgaacacaaatatttctaaaagtggctagcatgctattgttcacatatttgggacccaatgaatgaatcaagagggggcagacaggctccagaggcagaatcagaggccacctgcaagcagatgagccgaaggacagaggctgatgagacgagggtaaatgagtgatgccgccacacacagcaacagcctccaccctgatgtcgcacccgagcagctcttggggagcgatgtctccccaccttaagtccagctcaggctccctgacgtgcacagcctggctgcacccagagcagacccggtgggccacccatggggcagacccagaagtgagtcagcacccagtgtctcttaaaaggcccagtgtctcttcaaggctgagtgcggtggctaacacctgtaaccccagcattttgggaggctgaggtgggtggatcacctgaggtcaggagttctagaccagcctggccaacatggtgagaccctgtctctacaaaaatatgaaaattagccgagcatgattgcgggtgcctgtaatcccagctactcgggaggttgagacagaagaactgcttgagcccgggaggcagagattgcagtgagctgagatcacgccattgcactccagcctgggcaacacagcaagactccatctcaaaaaaaaaaaaaaaaaaacccaggaccagacagaagcctggaccacaggcagctgttgacactgcaggagtggaacagcttctatgagcctagcccaaacatccttcagctacaacagtttgggccttggcttggtctcagctggagagagatcaccttctcttctctgaaggttgactggggagttgggggcagacgtgggtgtggcaggtcttggaggcctctataaggccagggggctccatttcattccacatctcctttctgcacatgtctgagttgtgcgtagttttcctgagctgctcatggtattatgtgacataggattaggagttattcttggtcagccccctattaccatagtcccttggggtaaaattcccatgcctgccatcaccataggacttcctatgcatcccacagccccctgtaaacacagaattgctgtgaatgacaggaacagccccaaagtgaagtcaactgacacaatgtgttctagagagaagacaagacattaagatacaagtgctgaaaatccaggagtcaatatgatttccattccaaacccaagctctcagtacacagacacacacacacacacacacacacacacacacacattcatgaattcttctcagaaaaaaatagtagttaaagctttaaaaaatatgaaagcagtccacataattggccaaatagaagttccttcacccgagtccaataatcacatcttctataatatatactcacagtgaggcttttttttggaaggcggcttttcaaatgtgtttattagaatgcacgctgactttgctataattaaaatacagttatgctgacatccactgccctcattagcatgcgtttcttccccgaggttttgtcacaccgtcaaaaaatccttttccaaataggtattcacagctgattgcccgtcaggccaaggccccccagctttcagacacccgtccattgtgaaatgcactctggccccgaccccagccaccaggccacccaacactggccgcagcagtgggtgagcaccagcacccccacgtctttgccactgccctgctggtctgagtacacccctgaggattgaggggctctcccacacatactgccccaccatgagcagacccagggcagtgggcaagaaattgaacctgtcttctagggtgggaggaggggtgtcttctgcgagacacgagttgcccctcagccctcaaccggctttagtcctgagtctgagcggtgagcttaagagtggccggagcatccacgcaacatgtctcccaactggaccaatgaagagctcagccaccattagaactgtaaggcacccagcaccccccaccgcctcgcttcagcatctgcgaggcctgtaccctgaggtcccttgctctagggcccctctgctcccttccccgggacagctagagtcctacctgctcgtgaggccacttcagcctctcttctggggtctggtcttggacttgaagcctctctgggggtctccggggtgcttggcctcgggaaggaggttcagcgacttgggcctcgcctcttgcctgctggggctgcagctggccttgatgggtgggcagccctctgcagagtccgcaggccctggctcaggtccatgctcggggatggcctcactggtgctggtgatgctggtcatactcaagcttatcttgatctctgccacgatctggtcgatgtcctcctcctggtcctccaggtccccgtccccgcacctcagggggtaggcagaagcgctggtgttcccgttagcctccacagggtagtagtcctggtagccctctttgctgggacagtagtgaccgtcttcttcctggtcgtgggcctccaggacggaggacacatcctccgtgatgggcagttggccatcagggtagtcctggctacctttagccccgtgaccatgggggtgcaggcccgcccaggccgtccagtccactgcatcctggcacccgtcagtgtccataggatgcgcgccgtgggccaggtacacctgcccattgcagtccatgccctccaggtagctttggtcctcagggcagtagcggatgtagtaggggatgccctcctcctcctcagggaggccctcatcatagtcgtcctcctcagaggtgtcgttcacgtagtcggaactggagtccccatcggggctgtggttgtggcactcctgcttcttgggcgtggggctctctggccgcagggtgaccagctccaggccctcgggcacatagtcctccaagggcagctccacgtcctcgctctcgggctcctggtggtgggggacaggacccggccttgccctgtggtccaacatgctgctccccgcgctctgacgcttctggtgggccatggtagacgcttccggtgggccatggtagactcttctggtggggcatggcgggcgctcacacagccatcattccccagaggcagccactgtgtggaggaacattggcaaggacagagtcagaaccccacaaagcctggccacgtgtggggccactccaccgccacagcacctccaaccacgttctcccacagcactgtgaaaaatgatagctgaagattttcattgccgcaatctcttaaaaaactggaaacaacctaagtacccataaataagagaatgtttaaaaaaatgacggcagagttcacgtgctggaagagttggtggcatttttaaagaggcagggcaacacgtactacagtgagggattttacaggcctatttttgagggaaaatggcaagtgagctacagcaag

SEQ ID NO: 2046 - protein, 431 aa, Homo sapiens
MNESRGGRQAPEAESEATCKQMSRRTEADETRHLRGLYPEVPCSRAPLLPSPGQLESYLLVRPLQPLFWGLVLDLKPLWGSPGCLASGRRFSDLGLASCLLGLQLALMGGQPSAESAGPGSGPCSGMASLVLVMLVILKLILISATIWSMSSSWSSRSPSPHLRGVVVLVALFAGTVVTVFFLVVGLQDGGHILRDGQLAIRVVLATFSPVTMGVQARPGRPVHCILAPVSVHRMRAVGQVHLPIAVHALQVALVLRAVADVVGDALLLLREALIIVVLLRGVVHVVGTGVPIGAVVVALLLLGRGALWPQGDQLQALGHIVLQGQLHVLALGLLVVGDRTRPCPVVQHAAPRALTLLVGHGRRFRWAMVDSSGGAWRALTQPSFPRGSHCVEEHWQGQSQNPTKPGHVWGHSTATAPPTTFSHSTVKNDS

SEQ ID NO: 2047 - DNA, 1948 bp, Homo sapiens
  source
  (1)..(1948)
  CDS (201)..(572)
  CDS (789)..(1046)
  CDS (1117)..(1203)
  CDS (1290)..(1748)
  modified_base (290)..(389): a, t, c, g, unknown or other
  modified_base (584)..(584): a, t, c, g, unknown or other
taaacatggttgttgcaccaagtgcaacagacagtgtggtacaaacagtgcagggatcaggggaaaacagtgtgtgtgcacaacgtgcacagacagttgtacaaacagtgcagtggactggggaaaacaggtgtgtgtgcaccaagtgcacagacagttgtacaacagtgcagtggactggggaaaactgttgttgcccaatgcacagacagttgtacaacatgcatgaaatgggaaagctgtgtgtgcaacatgaacgacggggggttttgggtgtgggtttgtggtgnnnnnnnnnnnnnnnnnnnnnnnnnnnnnnnnnnnnnnnnnnnnnnnnnnnnnnnnnnnnnnnnnnnnnnnnnnnnnnnnnnnnnnnnnnnnnnnnnnnncggtcggcggtgctgcacgtctctcatcggatcgtcgtcttgtgggttcgtcggctcacgtctgatcggctggttctaggtgtcgctgactgtgactggtctagtgttcgttcgttgcttggcgatcgctggtttgtcgagctatctcgattggctgacggtctatgcttctgcgatgtcgatgtgacttagtcnatcttatagagacagagagaaaacacaaacaaacgaacaaagaagcgacaacactgttgatgttcactcttcatctttataactctttgctcttgttctgagccattgtacgtacggctcgttgcttcgactgcacgtcgcgtgcctgtgtaccccgtacctacttccgtctggctagtgtctatccttcgatgtctacctcagctgtgccgcggtgatcacctgtactgtgttcatgtgtcggtggttcatgagtgtgtcacgcgtgagttgcgctcgtgtcctctgtgtgtgcctgtgtcgactacctctgtagtgtgtctctcacgtgtctctgttggttctatcggtgtcattcgttgccatggcggctctatgtccacgtgttgtctcctgttgttaggctcctgtcgtgttgtcggctactgctccctcgttcgtgtctcgcttgcgctcgtgctcgtgcgtcgtctgtgtgcccactatcttctcgtttggtttcctcgttagctgcactctgtccttcgcctagggtgctgtctacatctccgtgtcgggtgctgtctcatcgtatcgtaaggttccctggctcggtttgtgtgcttcttccgttgttgtggtgcgtgttagtctctctctgcgtgtgtcttctgcttgctgtgaatgtttacgtcctgctgttgtgcggtgcgccgttcccgacagtcgtggttgtctccctcgttctgtgtgcttcgttctctacttctgttgttctatatgtctgtcgcctggtgtgttgtcctctcggcggtctacttatcgccgctatgtgagtgcctctatacgttgttcttcggtgtgtgtccttcttgtttgtgtgcctttgcctcgcttagtgtgtggtccccctcgttccgtgtcgtgttggggcccctgttgttcagtgaccgcgccgttatggagggccagcaccgttcggtctgggctgtgcctctgtcttgggtcagtcccggagtgggggtcgcggcagatgtccggttgtggtggtcctcggggggtgatctccgctgttgttgtgcgcccctgtatcgctgtcgtgttgtgtccgtcgtggggtacactccgcgtgattgtcgtgtccactacttgtcctccaggggtgtcctccttgtgtgccactgaccgggacatagcagggtctgattgtgatcgccaatgtatggctgcgtgtgtgcacttgatccgagatacaatgcatgatgagatcgcactgaatgctggtgtgtgcactgatgggacaaaccaaggctgatgcgacgctatgatgctgggtgtgctctgacggaaaccaaggctaatggacgcatggacgctggtgttgc

SEQ ID NO: 2048 - protein, 391 aa, Homo sapiens
  MOD_RES (30)..(63): Variable amino acid
MHRQLYNMHEMGKLCVQHERRGVLGVGLWXXXXXXXXXXXXXXXXXXXXXXXXXXXXXXXXXXRSAVLHVSHRIVVLWVRRLTSDRLVLGVADCDWSSVRSLLGDRWFVELSRLADGLCFCDVDLCRGDHLYCVHVSVVHECVTRELRSCPLCVPVSTTSVVCLSRVSVGSIGVIRCHGGSMSTCCLLLLGSCRVVGYCSLVRVSLALVLGAVYISVSGAVSSYRKVPWLGLCASSVVVSWLSPSFCVLRSLLLLFYMSVAWCVVLSAVYLSPLCECLYTLFFGVCPSCLCAFASLSVWSPSFRVVLGPLLFSDRAVMEGQHRSVWAVPLSWVSPGVGVAADVRLWWSSGGDLRCCCAPLYRCRVVSVVGYTPRDCRVHYLSSRGVLLVCH

SEQ ID NO: 2049 - DNA, 2265 bp, Homo sapiens
  source
  (1)..(2265)
  CDS (201)..(295)
  CDS (1318)..(2065)
  modified_base (820)..(919): a, t, c, g, unknown or other
  modified_base (2264)..(2265): a, t, c, g, unknown or other
gcgtggacctatggcccaagggggcgctagactctgcggctccatttgaccttgaataagtagcgagatggacagcagattcttgaagagaatgttcacccaggggaacaagcgacagaacggaggagattggacttgtgacgagcgctagcgatctccagggaggcggtgttgcgaaggggagagcgcacgagggttcgatggaggaggaccacgcggaccatgtaggccctacgatggatatgaataagagtaggcctgttgctatctatgtgtccgagtgctcggcgagagggtacgtgtgccggcagagaaaagtgtaaagcgtggatttagagtttctacttgctcccgccgtgtgagaatgtagcgtcatgcctggaatagctgcgagtatcttgttgtgtgtagcatagcagcagtcaacggacgggcgctcatgcactgcaagttatgaaccatacagagacttgtcgtctgtagtcaaatgacaattgtctggcctcgagcactgccctggtcagccctcatcgtacagtgccacttgtcgggtaggtgggttggtgtgcgagggatggaactaaaaggctcagatcaataggtttgggcctccccggcccccactccaataactcttaagttggctatagttagggactctttttttgtgtggttacctttcagaaagcccagcactggctaggcgcagtggctcacacctgtaatcccagcactttgggaggctgaggtgggtggatcacttgagttcaggagttcgagaccagtctgggtcttcaccccggggcggaggtacggtccnnnnnnnnnnnnnnnnnnnnnnnnnnnnnnnnnnnnnnnnnnnnnnnnnnnnnnnnnnnnnnnnnnnnnnnnnnnnnnnnnnnnnnnnnnnnnnnnnnnncccgggggaagactagtcctcttaaaaaatatgaatatcccctccagaacactggaggggtactaattaataagagacaattaatgagttctattaataatagttaatatggaaatttgttaccgcattcacattacctgaagtcgctttccccgtagcgatataatcaactttaaaagtcaacgtctgatctccatcctgcaacaaaatgttcccggtttgctgtgtctggcgtgatgggccgttgataccatcattcatatacatttgcagggccacgtttgtagcagcatcagatgaggcctgtttattctactacgctgtacatctgagctacgctctccgcatgtgccattttcttggtgaacgctgtgcttcttcgcacgcgcgctcgtaaggcttttcgtcgctctcctgctccgttgctgtttcgtctgtcgctcgttgttctgtctcacgttccctgtgccatcctctccctctctcttttccgccgctctccctttctcgcctttcctccctgtcttcgcctttgtctcggttctcttcctccgccccactagaccgctgcccgtgctcctctcctccgcctcctctgtgctctcttccttctcttcgtctcctcgtcgtgcgctccacctgcggccaccgcgcttcctgttggtccgctatcgttggtcatctgagcgtgtccttcgtcttttcatcttcgtgctgtgttctttgtgtcattctatttccctgatcccttggtctctctcgctctgcgccctccgtgcctctatcttgttcttccgagtctttgcctcgtcgtctgttttcactgttcttctctccccgctggtctcgctcactcacctcttcctcgcgccggggcttttcgctccccgagtctgcactgtcctctttcttgcatgttgggtccattctccctgtttctggtgccttctccgcacgctcttcgccggttccttctctgctggttctcttcccttcgttcgtcgtgtctatgctcctcctctcccctgctacgtttctcctcacgggggcttcccctctctctatcgtcttcctcttactcctttccctgcctcccccgtcacgccgctcctctccgccttgctctgctcgtcctctctcttctagtctctcttcttctcttatcacttctctcgactgctcttctttcttttttctttgtctattctattcttctctctctttccttctctcctcttctctcgcttctcttcctttctctactcttcctttactcctctcctctctgtcctcccttattcgttcttcgctacactctactcatctcccgtcccacttctccgcnn

SEQ ID NO: 2050 - protein, 280 aa, Homo sapiens
MEEDHADHVGPTMDMNKSRPVAIYVSECSARGLFVALLLRCCFVCRSLFCLTFPVPSSPSLFSAALPFSPFLPVFAFVSVLFLRPTRPLPVLLSSASSVLSSFSSSPRRALHLRPPRFLLVRYRWSSERVLRLFIFVLCSLCHSISLIPWSLSLCALRASILFFRVFASSSVFTVLLSPLVSLTHLFLAPGLFAPRVCTVLFLACWVHSPCFWCLLRTLFAGSFSAGSLPFVRRVYAPPLPCYVSPHGGFPSLYRLPLTPFPASPVTPLLSALLCSSSLF

SEQ ID NO: 2051 - DNA, 6887 bp, Homo sapiens
  source
  (1)..(6887)
  CDS (201)..(415)
  CDS (1077)..(1180)
  CDS (2864)..(3021)
  CDS (3919)..(4045)
  CDS (4851)..(4957)
  CDS (5134)..(5287)
  CDS (6635)..(6687)
aaaaatctccagggcgagggatcagtctcgaggctgccggttcccctggccctcagggatggagccaaggtcccagggcgggttttctttcctaggaagtggttgctgggttctgaggagtttcccccttggcagccatgagccggcagttctggtagtgactgctgggccctgctggacagcggtcgcatgcagctcctatgaggcccctgccgccggtcggcgatgtccggctggagctgtcgcctccgccgccgctgctgccggtgccggttgtgagcgggtctccagtcggctcctctgggcgtctcatggcctctagcagctccctggtgcccgaccggctgcgcctgccgctctgcttcctgggtgtctttgtctgctatttttactatgggatcctgcaggaaaagatgtgagcgaccccgggggcgggccgacagtctctccccagcctgtgacagggatcccgggccttctgcctctggacccgggctttcctcttgtcctcctgcccggctgtcgccctcttagcaccctactacttttgcagctatggctgagcctacccagaattccagaactccaggattattttctggattcttcggacttggttattttcttttcttagctgtttttccccgcttggttctaagggcctgcgttttacaggctgagacttctattcctcaaacaggacccgagtcggcccccttttggtactcccagatgcttgcaaacaacctattcgtcctcggccttggtgccatagccgaaataccgtctcctcctgcctggggtacctgatttcactatctcgttctgcatgtttcctctccgtctttttcgggtattcttttcttaggctttggaatcagtaggctgggatgtctagtttctagatccagtaaaatcagccccttttgcaaatgagcctagtggtccttaacaaactctgcctacatccagagaggcaagataattttaaagttttcagtggctcgggatatattagatgacagtgagtgaaatacactaatttctccctcttttctcatgcatttcatttctagaacaagaggaaagtatggggaaggagccaagcaggagacgttcacctttgccttaactttggtcttcattcaatgtgtgatcaatgctgtgtttgccaagatctgtgagtacccagatagtaatttgttgggtaccccaccaccccaagttccctcagtatgctgggcattaagcattgattcaaccttaaaggctaactcatgatctccaccccattttgtacttacacagcctctctgtgaagtctgtaaaactaatgactttgaagtggagtaaaatattatttccccaatttttatcagcttctgagttagaaatgttcagagaatgggtcttctatattccaaatccccattgaaaatacttaaaacatttttttctttccctttgagtttcttttgtgtgtcagcttcaagcatgctttgagcattctctctttgttccctggggactagcagcagagctgactggtcccttgaactgaatgaggcccccacctccaccctgcatgtggtcttttgttgggcttaggtagaattggaaagatgaataattttcagagatttcccagtgtaacaggacagaaatagcttgtgtcttgtttgacagacaagttcctttcatgtggcttcagctttgcttagtggtccatcctagccccaccaggtttctcttgtttttttttttttttcttttcttttctttttttttttttttttttgtcttctcccagtgatccagttttttgacactgccagggtggatcgtacccggagctggctctatgctgcctgttctatctcctatctgggtgccatggtctccagcaattcagcactacagtttgtcaactacccaactcaggtgaaacctcagggtgggatgatggttggctcagatatcatttgaaaaggactaagagttcttccctcaggtctgtgagttaaaaaaaaaaaaaaaaaaaagataacggtcctgtaagacattgggagtgtatagaaccatagaacttacgtttagtggtggtgggttgggccatgatagggctgctttctgaggctgaggtctctggtgcaggccctgtgcttactcatcttaatcagtgcggtacctagcatagtacctgacacatcacagatgctcagaaattatttgctggatttaatttcaggtccttggtaaatcctgcaagccaatcccaggtaagcaaagaagatggtcttcctcttctgtcgtcactcttcctatagtaagctctctctctgctacaactgtgtccctctcggcttcatcatcccatcatggctgtctccagggactttcccccagctctccctgctgcccatcctgtcatctgtgtcacttcttgtgatgttcataggctggtaatccttaataggagctaaaggctgacctagcctgcttcacttggtcagccatttctgtgttgcatgtgtttatattgtcattagacaacttaattcccattttgatcatcagtttctttatctcaacttcttttccttctccactgttccctacccttgtcctgtcccttcctggacttttcacctttgttctctacctcctccctgtcttatacttaaccctgttgctcaatccttatctaggtgccagcctggcaccctccttttgtcctctctaagccttccttctcagtcattcttttctccctgagtcttttcttggttcctgggagggagggcattggggtcatcaataccttatggatgcctgaattttccactctgttttttccctgtagtcatgctccttggggtgaccctcttgaagaagaagtacccgttggccaagtacctgtgtgtgctgttaattgtggctggagtggcccttttcatgtacaaacccaagaaagttgttgggatagaagaacacacagtcggctatggagagctactcttggtatgagatcctgttggggaaggcacccttttccagcaaacttaaccaaaggatagtctcacctaggcaggtagaaggccagttctgtgtcaagggaggttgtggtgctccttgtccccatatctgctctttgctgcaggcccctgactctattaatgccatagtgggaaacctgaaatatttaactacaactcagctctcattctggagaagagataactctgagggttgtggctgaatcctggtgtgaggtcacagagacctgagagcaaagagggaaggaataatgtctctcactgtggctttccaagaaacctggaagccagagtttaaaataatatgatagtagctggtatgtatgcattaggcactgttccgagtgttttacatgttaattgactaatttttacaacaataatctcatatgtagtattatctccattttacagatgaagaaactaggcacagagaagttaactcgcttgcccatggtcacttggctatttgaagtggtagagtcaggattccaatccaggcagcctaagcacaggatccggtctctggagcactatactccaagctaggaagctaacctgctgggactacctttcccctcccagtatgttgggaagtgagcttcctgctctactctgattacaaaatcactacgtagctcagttagcctgtcagtccagtgcgtgggccggggggcgggggtggggggtagtgagcatggtctctccccaccttccacctgtgaccaaatggcaacgttttgttctgaggactttaaaggcagtggctttccaaggagcctgagagtgagaatcctgtgtcctgggtttggaaagggccctgttggccacttcactgcaggctgcaccctttctttcccagctattatcgctgaccctggatggactgactggtgtttcccaggaccacatgcgggctcattaccaaacaggctccaaccacatgatgctgaacatcaacctttggtcgacattgctgctgggaatgggtgagagccagttctgctgttcttcccatgtatcaccagagggcaggctgccctcatccttttgatccctctagctgttagttgcccagaccaagggcctgaattagttccaagatgcccttttgttcaagcccttgagaaaccttcctggaaaaacctgcaccagcaggatttgtttgctacttgttactggcacaatgaaggagagtcgtgtgtcagttgtcatgggaagacactcagtagtaaaacacagggaggtacctgggaactttccctttcatgagggaaatgagacacacgtagtgctcacaggaaacagagttagctgtacactgaagacagttcaaatgtgaatgatttgctttgaaatcagtgcttcctaacttttcaaatttgggcacatgtagaaagtattttttatacagcacactggggttaatggtggaggctgctgatggctgaaggtgactaatgcgaggggcttccttgagctaaggatgtgtgggtcagcatctctacagcatctgaggatttctgcttgtaatcactttggtagaagtaactcattaactttcaagcctttctcacaaaattctctttagtttctctaatcagagaaaaatatgagaagaatcaatgatgagacgatgcaaacccacaccatacactttcccgcgtcccacctcccttgcagttctttaacaggccatgtgcaggagtgtctgtgtgtgtgtgtgtgtgtgtgtgtgtgcgcacattttgtgtgcacaaaatgcgccgtacatttgttgacatgtcttctcaggaatcctgttcactggggagctctgggagttcttgagctttgctgaaaggtaccctgccatcatctataacatcctgctctttgggctgaccagtgccctgggtcaggtgagtgcttgaaaggggatggcttggcttccctactctggcagctggttccctaagaaagactggcctggctggaagaagagggtggcaagattagccctgaggtctgtttatagactttagaccaatggcagatacccagaagcccaccggacctcacctttatctttctctagagcttcatctttatgacggttgtgtattttggtcccctgacctgctccatcatcactacaactcgaaagttcttcacaattttggcctctgtgatcctcttcgccaatcccatcagccccatgcagtgggtgggcactgtgcttgtgttcctgggtaagtggccacacagagacacagtgacagctgaattttttctcctaaaatttacttgtatatttatgaaatttgtttaaatattttagagaaaacttttctcttttttttgagacggagtttcgctcttgttgcccaggctggagtgagtgcagtggtacgatctcagctcaccaatcgggtgagcctcctcctcctcctgggttcaagcaattctcctgcctcagcatccggagtagctaggattacaggcatgcaccaccatgcccggatgattttgtatttttagtagagatggggtttctccgtgttggtcaggctggtctcgaactcccaacctcaggtgattccccccgcctcagcctcccagagtgctgggattacaggcatgagccaccgcgctcagcccagagaaaacttttttaaaagagaaaagaggctgagtgtggtggctcacgcctgtattgttacgtttggaaggatgtgaggcaggagtatcgcttgagtttaggagttcgagaccagcctgggcaacatgatgagacccttgtctctgcaaaaaaatacaaaaattagctgagcatggtggcagacgcctgtggtcccagctactcggggctgaggtgggaggatcgtttgagcccaggaggtggaggctgaggtgagctgtgatcacaccactgcactcccacctgggtgacagagtgaaaatctgtatccaaagaaaataaaaggagaaaaggaagctttatttctaatccagccttcctagggtctccctctgttgctcaggctggagtgtagtggcatgatcatagtccactgcaaccttgatctcctggactcaagtgatccacccaccacagcctcccgagtagttgcgattataggcatgtaccacaatacctgaccaatttttttttttttttttgtagcgatggggtcttgctgtgttgcctaggctggccttaaactcctgggctcaaatgatcctcctgcctcagtctcccaaaatgctgggattgcaggtgtgagtcaccacattcagccatagcctagaagttttgactcttaaatttcttttagtcttgctgtattatatatgtatctatatctatctgtatctctatatagatatatttatatagatacagatatctgtaataactagtatcctggtgccattctcttgtctctgaggaagttacataaaaccagtgttctgacatgtattttatttaaagcccccattttggagatacaaggccgactaccccaccccaccacaatcattggtaagtttcatttccccccataaggctaagcccattttcttccttttcataggtcttggtcttgatgccaagtttgggaaaggagctaagaagacatcccactaggaagagagagactacctccacatcaagaatatttaagttattatctcaaacagtgacatctcttgggaaaatggacttaataggaatatgggactgagttccagtcttttttaataaaataaaatcaagcaaaatcacatattctaaaaaatgcacttggattttaacaagacagagtggtggtttttgttcttcatgcc

SEQ ID NO: 2052 - protein, 305 aa, Homo sapiens
MRPLPPVGDVRLELSPPPPLLPVPVVSGSPVGSSGRLMASSSSLVPDRLRLPLCFLGVFVCYFYYGILQEKITRGKYGEGAKQETFTFALTLVFIQCVINAVFAKIFMLLGVTLLKKKYPLAKYLCVLLIVAGVALFMYKPKKVVGIEEHTVGYGELLLLLSLTLDGLTGVSQDHMRAHYQTGSNHMMLNINLWSTLLLGMGILFTGELWEFLSFAERYPAIIYNILLFGLTSALGQSFIFMTVVYFGPLTCSIITTTRKFFTILASVILFANPISPMQWVGTVLVFLGLGLDAKFGKGAKKTSH

SEQ ID NO: 2053 - DNA, 1375 bp, Homo sapiens
  source
  (1)..(1375)
  CDS (201)..(1175)
  modified_base (98)..(98): a, t, c, g, unknown or other
  modified_base (102)..(201): a, t, c, g, unknown or other
  modified_base (331)..(331): a, t, c, g, unknown or other
  modified_base (340)..(340): a, t, c, g, unknown or other
  modified_base (353)..(353): a, t, c, g, unknown or other
  modified_base (862)..(862): a, t, c, g, unknown or other
  modified_base (947)..(947): a, t, c, g, unknown or other
  modified_base (1042)..(1042): a, t, c, g, unknown or other
  modified_base (1102)..(1102): a, t, c, g, unknown or other
agaaagggagcccacatgagaagaacaaagtcagtgttagagcaggtggaggtctgggttctgagctgaggtgtcttgactccactgaggctcagttngggnnnnnnnnnnnnnnnnnnnnnnnnnnnnnnnnnnnnnnnnnnnnnnnnnnnnnnnnnnnnnnnnnnnnnnnnnnnnnnnnnnnnnnnnnnnnnnnnnnnntggttctgtttgtcgcgcgtgtgctgtccttctggtgtgccgcgtgtggtgctcgtgcgctttttgtcgccgcgccctgtgtctcccctcgctttctgcgccgcgcggcgggggtgtcgtgctcgcctcnttgtcggtngtggtgtggtggngcgcggtggggtcgcgcgcgtggttgccgcggggttgttttcgcgcgtgttggcgcccgtttgcccgcctctttctggggcgcgtggtgtttttgtttttggcccgtgtttgttccttttgccgcggccttgtgtgcgccgggggctccccgcgtttggcccgtgtcttttcggcgtccgcccgggttttcgggctttctctggttggtggccgttgttcccgttgcccctccgggcggtgggggtgggcccggttggggtcgtgctgccgtgctcctggtggccctggggggtgcccgctggggctttggctctttcttggggcccttggctcttggctgcgggtggtggtggttcctgcggttcccgcctttcgcgggtgccccgctttttggctctttcccgcctggttcgtgggggtcctttctcggggtgggtctttttgcggcttgttgcggtcgctgtgttggcgtttttccttccccttgcggctggtttcgctttgccgnttggtgccttggcccgtgttgtggtggtgtggcttcctgtgtttcgttggttttgggggtgccgcgtttgcccgtttggtgttgncggcgttgcgccgtttgcgtggttcccggctctctggtccgttgttttgtggggcgcgtcgcgtccttgggttgttgctcttgccttcctcgttngttcgtcggcgggggctcggtccgggttcgtcttggtttgtggctggctgctgtcgtggnttttcgtctctcccttggtggttgcgggtcgcgcacttttgccttcttacagccctggagggcagaagtctgaaatcaggttccctgcaccaaaatgaaggtgtcagcaaagctgtgctccctctggagactctggggaagaatctgtttcctttcctttactagcttccagaactgcattccttgacttgcggcaaactctgaaattcagtttctcctgcaagtaagaaagttgggctaaatgctcttacagctttaatatctggccttctt

SEQ ID NO: 2054 - protein, 324 aa, Homo sapiens
  MOD_RES (1)..(1): Variable amino acid
  MOD_RES (44)..(44): Variable amino acid
  MOD_RES (47)..(47): Variable amino acid
  MOD_RES (221)..(221): Variable amino acid
  MOD_RES (249)..(249): Variable amino acid
  MOD_RES (281)..(281): Variable amino acid
  MOD_RES (301)..(301): Variable amino acid
XVLFVARVLSFWCAACGARALFVAAPCVSPRFLRRAAGVSCSPXCRXWCGGARWGRARGCRGVVFARVGARLPASFWGAWCFCFWPVFVPFAAALCAPGAPRVWPVSFRRPPGFSGFLWLVAVVPVAPPGGGGGPGWGRAAVLLVALGGARWGFGSFLGPLALGCGWWWFLRFPPFAGAPLFGSFPPGSWGSFLGVGLFAACCGRCVGVFPSPCGWFRFAXWCLGPCCGGVASCVSLVLGVPRLPVWCXRRCAVCVVPGSLVRCFVGRVASLGCCSCLPRXFVGGGSVRVRLGLWLAAVVXFRLSLGGCGSRTFAFLQPWRAEV

SEQ ID NO: 2055 - DNA, 21925 bp, Homo sapiens
  source
  (1)..(21925)
  CDS (201)..(439)
  CDS (2638)..(2859)
  CDS (3676)..(3986)
  CDS (4563)..(4667)
  CDS (5037)..(5280)
  CDS (6110)..(6308)
  CDS (6451)..(6572)
  CDS (7102)..(7897)
  CDS (10179)..(10467)
  CDS (10700)..(10803)
  CDS (11936)..(12435)
  CDS (21464)..(21725)
  modified_base (212)..(311): a, t, c, g, unknown or other
acagattttgagagagcttaaaaaatttataatgtatatatatacatatatatatatacacacatacacatgcacataatgtgtttctcagattaatctagaattaacttcataaatactgactgtgttactctattagaaacactatatgctctattattgaaacaaacatatgtgggttataagacgagcgtgagtaaatgacagttggnnnnnnnnnnnnnnnnnnnnnnnnnnnnnnnnnnnnnnnnnnnnnnnnnnnnnnnnnnnnnnnnnnnnnnnnnnnnnnnnnnnnnnnnnnnnnnnnnnnncccccttccgggcccccgccagctgaggggagccgccgactggagccgccgtccggctccccggccccccaaacaaaggacccgccgggtcctagtgcccgcccgctccgtcaccttcgcgcctccgggtcctagcgcctgctcaccgctcgcagcccaccctgccaacctctgcctctgccagtcgctaatacctgcccccatataggcttgcctttatctttctccttgcctgctgcccctcagctcgcgaccctcctgcacctgcctccagctttccctgtccgcaacagtcctccacgtgtttcccacgcaccccacttctgtgcccccttcctcaccccccttgttccttcgccttttgccccacacctcctgctccttttcggcatttgcctgcagctgcagtgcttttagacccccgccctctccgcgttagttcgtccgtccatccatctatcctccctccctccatccttcggtccatccatccatgcctccaacccactgtcctttcccaggcctcttgccctgcctcttggctctctgctcttactctcaccttctctaggcccctgagtgccttagtgagcgggcctacagccccttcttctgatctttgtcttctgggccccagggagcacctggcctcgtggcctttcggggtgacagcaggcatcacgcccctgaagaagtttgcaagtgagaagaggtggaggaggagactgcacggaggggtctctaatgacacttgttctcctctgagacatccgactcccagtttcgttctatccatcattccccgcacttgcatttaacggacttagagtgggagctgccccttgtctcttgcgtgcctaacccacgacccctcataatctggatattatataagattgtcaacaatcttctcatcctagaaaggagcatatctgttaatgggcatcagagagcagacctaagtgggagcccaggccaccctggggctgccccatgctgggtgggcaaagatggggccattgtcagggtctgggtgcattgagaaccggaaatggagtcagacgggtttggtgactcagaattgattttttttttcccaagggacagggagggggcgtagaggagggaggggggaggagagaggtagggggatggggaaaaagctgctttgcacagctaagatgtttttgtcattaacccagaaactgaggtacaagggcaacccctgcccaaaggccctctaagaaggggagggacttgcatagctgaccaaggagactttgaagatgctcaaggaccaaagacagcagtttctctgctctgtgaccatcctatcagtgcaggacctgagaagctgggtgtaactttgacaatgctatggtaacccaggtggagcaaaattgagttcatgggggtggggacctgggagagtatctatttgggatgccacatagtagcagaaaggacccatcgagaaatctcaagaagagactcagggacttatagaaacattggttaaggacggtttcccctttaaatggggaagcaggcccagaaaagagatgatacttacccacaatcacccaactagttagcagtggaaccctaaactgcaccttgaagtgaagggtcccataagaaaggtggatggattcttcttagtggggccatcttagtccagatgcagcaggtgaaggaagatgggcatttgagaatggacccactgaaaggttccccaagtggtcctagcaccaggagcttgtcacggagtgtgggcttcatactgttgagctgcaggccctgcttggggcttctggaaaggggacaacctctgggttgtcttctgggaagaacagtctctggtaaggagaggctggagactctctaaaactggccctgacccttctgagctgtgtttctcctctaggggctgagctggaggagagtagcaaaaacacgaagaagttggatgccatgaccctcattaaagaaggtgggagtcgacacacattagggctgggacccagggcagacaggaccacgctccacttttccaccacactacagaaggaggtggctgcttgaagcagctgtctggggaccctcattttgataggtccgagtcggccggttgttctggctcctgtgacctgtcgttggagatcataatcataggtgattgcccactcacctgaaagcgtataccctttgggactgcttagatcgaactctggaagctggaagcattcagcatggagcttgttatatcagcggggaggtgaagtgccttctgagtgtggggtgggagtgctctccgatcttccagagaaaccctgggatcttcagccccagtgacatgggcttctgtcattgcagacatgtccatcttcgggcactgccctgcccatgatgacttctacttggttgtgtgtaaccactgcagccaagtggtgaagcctcaagctttccagaagcactgcggtgaggggagccctagggaggagataaagggacaggggaaggtggagcatggaactctgaggacagggtcagttgggaggtctcgtagggtaatggagggtggtgttgaggataggaaggttgtgggggtggcttcagagcattgtggggagtcgggttattgtttgaacaaaattctagcatccagtggaattacgggaggagttaagacattcaggaagctgggtcttgaattttgagtcctaaaggctcagattcaaatgggaaggaggcatgtttacaatctaatttatggaaactcagattctctcatgtgagtctatggacatggttaggttggggaaggaagtggtgataccactcaccttgattattctttccacctcctggtgacagaaagaagacatgggcccctcagcaagctttatggccgggccccacccccacctccagcccctgccagctctcagaaatgccatgtagtgaatgggcagggcccagcttgtagggccccaggttccacgaaaacctcctccagggagaagggccaggggtcccggagccgtggccaccagcctcctgagaagacccagaaggacaacctctggtaaggagaggctggaaactttctaagactggccctgaccctgacccatggatgggctgacatcaatacagacagccctgggtcaaggcatactcctcacagcaggaggcagccgtcctgtctgcagcttccttccatatattccagggaagatggggtctcctcttcccgtgtttcacacccctgctggagcccacccaaattccagggctgggaaagagatggctctgggctagagtccaggccccaggcctcgcctcccctcccctccctcagccaaccccctctctctgtgtgtagccttttcgtgcctgtggtgaatctggagaagatgtccagtctcccgaagcctgatggacatggaatcagggtggccccaccctctgcttttctcagccagccagggggcctcaccaaggactcccctggaaaacctcccatggctcccccttctaaagaacctcctggcagagagaacatcgagatcatccccagtgaggggtccagtcactgggctgaaggcagccctcctgaaaaggagcccagtgggaccaggctgccccctaaaacccaccggaagatggctcgtgagtagttgtggtcttgggggtccagaatgtagagtggggactcctttgggctgctttgtccttgggctggatgaggaggaggtcaggtttatgggcctggccatcacaggttgtagggtataggagccccgtcacctcttgacctgcttgcttcctgggaagcttctctccatcctgtgtctcctgatcaaggctgagggagcccatgcccaggaggtgaagttctttctcactcttttctcacctagatccagggcgccagccagacacatctcacagctggcttctctggcctcccagatgcccatggctgcttttgtttcttgatgtgtgttgccctgctttgggcttgaagtcccaaaaggcgcacctgaaattgggatagggatggttctcacacccagcaaggagatgttgatgcccagaagtttatctggaaggtacagccccaggctgagggctggagtcttctgccttagtaccagttctcaggcccttggcaggaagcggccagatcctcctgtaaactcctggaaatggtcttgaggttcattggaagtgctttccccacagggaaggagtgcgacctcaacaggcagtgtggggtaataaatccagagaccaaaaagatctgtacccgcctgttgacctgcaaggtaacccccttcccactgcacggtgagggaggacagcacagggcttgcccactccttccctgggcaaagagaggaatgtcgatgttactgaaggtccagcttaagggagggcagttaggcccacccaagggaaggggagatgggtatgcccctcctgggcagaaggtgggaacagtgggaaggagggagtttccagattcccccatcccaaaggagggttttggccccatgggggaatgaaacaaagacacatgaacacagctgcaaatatgcccacctctctccctgccccccaacttgcccgggccaaagcaccctgccgtccctcaccccttctcagttcatacctactccccagctctccactctgctgtattctagatccactcagtacaccagcgccgggaagtccagggccgggccaaggactttgacgtgctggtggcagagctgaaggccaactcccgcaaaggggagtctcccaaggagaagagcccagggcgcaaggagcaagttctcgagcgcccctcccaggagctcccctcctcagtccaggttgtagcagcggtggctgctcccagcagcaccttctctgttcgtgccaagcagacctacccatactgtgcactgcccaggtacgtctagaatccaacccctacctcacctgggggtacttggcccctaagccatcaggggcccctggaaacaggctcagggagtgtcctggaagaggcactccctcagccctgagtgtgggggtattcctggggctcctgacagtggtgtggaagcaggagactcccctgtttccaaccaggcataccacagcaccccagcctctcggcagtgtgccagatccaacactcaggatatgaacattttcccagctgcctccaacagaccgaaacttgtcactggggagctgaaagggtcacactcctgggcaaggcagccctatgtgtattcactcactggccccttcgcgtgcagaggctatgccggaccccagggagagcctgacttgctgaaggagacacacatgcatctctgcctgtcacacaaggggcagacacgaaacacaggctcagctcacagacaggctcacaggaatatgtgatgcaagaagggggttgagcgagttgactgggctgaccagagctgggtacagttttaactgtgaagattttctggaggaggcggatctgcagcagattatcccctgaggaggaaggggctgggaggtgaaggggctggggagagaatcccttgggagcagtctctctgtctcttactctgtgagctgtgtcgttccctcctgtccttcccttccctctgtcctcttctgattgccctgcagggtgtctgccctggtgccctgctctttgagctcggcaggttcaaggatgcccctactctgaccccacaacagtcacattcccctggcatcccttttggcccttccaggtcccgggcctcctccgagagtgaattggatgatgaaggcccctgtggtggtgatggggacccaggcctgttccccttccccatgccccggggtgggacccaggcctccagcgaagagagtgaggaggaggggacatctgacgacctccacccaccccctgactgccattatgcaacccggcccccacggccacaggcggtaaggacctggaataggggcctatggagggggtggcccagcactcctggccaacaacatggggaggaggccagatcctgtgtgcagatgctgtctgtgcaccccagaccctgccaaccatgcaccttccttctgcctttagttctgcacctttgggagccggctggtgagcccaggatgctatgtgtttagccgccggctggaccggttctgctcagcactcagctccatgctggaacggcacctcagcacacacatgtggaagtaagtctctcggacccagaatggaagttctagaatggaaattcctaggttccagacatacttgggcttcagaagccctgatctttcctgtatacccataggtgtgccttggctatttgccagcaggaccccagatagggagtagcatgaaaaggaggtgggaaaacttggcagcctagagtttggctaaggcagggcatggaagggtggtctgggggtgaatctagactttcatccatcacttccagtaccttttgggtaactagggataggggatgcccaaaccaagatttaaaatgaagttcctagtgggctgcctcctagttagtaggtactagctaattcctctccacaggcacccctgtgtcttcttcctaaccctcagttccagcatctcccagcagatggcagcaactctggggctctgctgaccatttctaggtggggcagagagactggagtgtgtcttgtgttgggggaagctgtcttgtttcttggcagtcacagtggggctttctttttgctgcaggaagatcccaccggcagctgaacctccagctcaccttgtcaactccccgttatctgctcccctgagcccatcctctacaggcacctgcccccgccttccaggtccaaccctgagacctgcctgcccagcctccatgccccccaccaaggacaaccttgtccccagctaccctgcaggctcccccagcgtggcggctgcctgtagccaggcagagtgcatgggcgggagccaggctatcacctcaccactgcctgccaacacgccatccccgtccttcagcaagctgccgccttccaaggccagcaagtcatccaaaggcaaggacggggtggaggtggaggccccttctcgaaagcggaagttatcccctggccctaccactcttaaacggacctgcatcctggagcccactggaaaagggaaaccctctggctgtaggggcctctcggccaaaactaaaacagccctgagcatggggcttaatgggacaatggggccaagagtgaagcgggcagggcccctggactgtcgtggctcccctcatcagctccccacaccagtcaaggcttctcagctggagaaccggggagcagctggacacccagccaaggccctgccaaccaactgcctctctgaggaggaggtggccaagaagcggaaaaacctggccacttattgccggccagtgaaggccaagcactgtcaggctggtgcccctgctgatgtggcctgctctgtgcgccgcaagaagccaggcccggccctggcctttgaggagaagtgctctacactgaaggtaccagccaggctccctgaagattgatgagggtggggcacacagggggtacctgatacagagaagatgctacattggtgtttgtgcagggaaagggaggaaggggaagttgagagagttcctggactgttttctttaggaagaggtaggtcagttcttagcaaagtgactccagctttttgcctggtgaaccttcccctatccctaaccctttcccttgggctgaggagatgcggcacccctccacccctgcttttgctataatcaaagggctacttctttctgaattggctgtgaccctcattccaggtactggagctacctctgttccctgaaggaaagggagtttgagtccctgggtcacagcctaacatgccgagcagcaaggtgggtgggctggtctcactggtttttcctctgggcatcagggccttgaagggcaggcacacaaccccatgtccacttatgcacatgtgcccacctccaggtgtgcaggtgacaggcaagttctccagggtttccagtaaagcctgcagccagttttatttgcctcttctggtgggagccctggtgtagtgtgctatgtgctctccatatgatctctgccaggagggacttactggaggtgggacgggggtgctctcctgggttagatgtgggcctaatcataaaccctgtgtgttctccagcttcactacccaggctgcccctggtgagctggcattcatcttcccccttgctcagttttactcaccaggccagcagaaggaaatcaagctttagcctctgtagtgcacacagttcactgggtaggacagctggtaggcccccaccctgaccctttctctcgcctcttgtcttcctgcagtcaaaagcccattaacgagaaagtgcctgcccactgcaacggagccgccagcacctcctcccctccagatccgggccccaggctgctgccgctttttataactttatattatttttttttaagaaaaaaagctctttaaaatacctcaagactgtctccctgttctgttgctgctatgaaaatataaaaacagaaacatagaaaaggaaggaaaaaaaataacaaaatgagtgtccttactgtccccagccctaccctgggaggctgagatgataggcagccagactccagctcccatagcttgcctgcaaaagtctcttatgctcattattattattattgtcatcttgtcattttcaatagtgtgaaaaatgtttgtgtcactggggtagtctttccagacaggatgatgaggcgtgtggctctgaatgagtaaggcttcctgagtcttgacaccagagacgactatggtcccattgggaagagaaactcgagagggggagctgcacttctggctctttctaggatccttgccccgagggtctgggaattggcttgtgacccttttctggtccttcagcaaccctaggcatccatccctccctgaattattgcctgcttttcttcagctgttcctgcagcctcattttctcagccacttagggagcttgagctgggttggtcattgctgttgggatattcctgttttctattggacagccttccttccctgcctgtgggtttgcctttaaggaaggggtagaacctttcccagggaggcctccttgggttgaaccaccccttttttggaggcaggaagggaaaaggcatcatcacttgcagaactggtggtgtgggaggccacaggagtgtgggaggccttggtccttcaggatcacctggctcctcagggctgagcagctgctgaggaggcggcagggctgggagtgccctagtttttccatttatctcgctggggaccactcccgtgcagatgcgagaggagacttgcatttccctcctttggtccaccaggttcaaggcactatattttggcgatgtcctttcctattctccttgctcttaggcatggaggaagcttgttccctgaacaagacaaaatgaggtgacaggagacagtgcacagccagggaaatccagtactactagaaatcggctccaaacacttgtttcacagtcttggttcagcgtaccaagtgtgtgatttggggtttcactgaaatcgtttgccacaaaagtaatttccacaggctgcttgggatttaggcccttgtagacagacacacagatacaaatgaaggtgggctgggaactgttcggtccccttctgcctccgggctctcgcgggagcgggcctctccggggcactcgcgtttcccccccagcccccagagggcgctgtgggccactccgccgcactgccggcggcgtccccggggaggagcctctcctgcagccgccaccgcctccgcgatcgcaaacccggaagacgtgttcgggcagctggagtgtacgggcccgcgggccacggccatgcagcccctggaggtaggtctggttcccgctccagctggggagccgagactgacccgctggctgcggagaggcagtgggatcttggcgcacctggtagctttgggcttcaccatctttctgacagcgctgtcccggccaggaaccagtgagtgtgcggggcggggttgcggaagggggcggagtggagatgctggaggggcagcgcttgggagccccgggagacttggaggagggaccccagcagtaaaggggagacagaaacagtggagggattttgagggcctggtggggcggggccccagggatcctggaataatggggttttgggtgctgtgggggaagggcagacgattgaacagaccgaactacttcctcagaaacaggtcccctgatggaggatagaagtgaaggaggccgggcgcggtgggtcatgcctgaaatcccagcactttgggaggccgacgcgggtggatcacttgaggtcaggagttcgagaccagcctggccaacatggtgaaaccccgtctctactaagaatacaaaaattagccaggcgtgatggcgcgcgcctgtagttccagctacttgggaggctgagggaggagaatcgcttgaacccgggaggtggaggctgcagtgagccgagattgcaccactgcactccaccctgtgcgacagagcgagactccgtatcaaaaaaaaaacaaaaaacaacaaccaaaaaaaacaaaaaacaaaaaaggggcagaggactgggctgccagctgagaggtgctgaacggggaacccgggccaaactgttgtatgtgtgtggataaggaggccctcttggttgctcaccctggggctccttggctgctccactttgtccttagttcctgtgcccgattaggattggggatggtacttttctcctgtggctagattctttgggttccacctagctacaggggcaggaacaatggtaccaagccctcagcctgttctctttgattcttaggtcttttctcctggcaccctgtattcatggccttggcggtgagtttaggcttctatctgatttgtttgggtattcctcacctcattctcccagggaagcacccagctttcagaaagctcagcctttctaaggctaagacaggtggaggaaacatctagggctcatctttccctgcagcctatgggattgggaaacctggagggctgggccataggcagttgtcagatggttgaaaagggcgggagggcatggaagataatttctttctccattggggccggaaaggagaaggggggagaggtgttatccggtcatctcccgacttgtccccaaagttcaggaagaagtttaacatttgctactccactggtcaagaaatgggagtcattgtagaggttgggatggggagatgtcaacctgaatgaggagacgtgcactcaagtgctgattcccaaatgttcccagaaatgttgagctgtgaggctggtggtcctggttgaacttatttaacccttaccctttgtcctctttgttaggatgtatgagagcacctcctttttctcaggcctccaagccagacatgaggcttactggctctctcctatgttcacagttctgcctctgcatggctgaagccatcctactcttctcacctgaacactccctgttcttcttctgctcccgaaaagcacggatccggctccactgggcagggcagaccctagccatcctctgtgcagctctgggcctgggcttcatcatctccagcaggacccgcagtgagctgcctcatctggtgtcctggcacagctgggtgggagccctgacactgctggccactgctgtccaggcactgtgtgggctctgcctcctttgtccccgggcagccagggtctcaagggtggctcgcctcaagctctaccatctgacatgtggactggtggtctacctgatggctacagtaacggtgcttctgggcatgtactcagtatggttccaggcccagatcaaaggtgcggcctggtacctgtgcctggcactgcccgtctatccagccctggtgatcatgcaccagatttccagatcctacttgccgaggaagaaaatggaaatgtgagttcctgcgaacgctgaatctaggtgggacgcttgccttgaacatcatggttcctttggtgatctataagggatctatttaagaagtggtcaggttttcgcacttcttggctggtccagggactgcagaaaccaaagctgctattgttgaggaataattcagtgggtcaaaatggggagatgtactgggtatgagtggaaggtgatggagagcctgatcctgaagcctctacttgatgagagacagagttttgggtggtgatagtgatgtgctggtggtcatttcttgcttgtgtgcctgatgaaaaactgggttcctgtaagttatgaatggcatccagggatatttgggttacttttaagaaagcagtgtgatgtagtggagagagcccatgggtcttatttatgggatatggtcctcttaggctctgttgtacaaccttaggtacattccatatcttaagaccactgtttcttcatctgtgaaatgtttctaaacaatctctaagtcccttccttctctaatatacagcgtctgtcaggtcgatgtctcagaacactctcccagctgtggaccacgtggaccacttagcagactcagggggtagttctttactctccctttactaccctggagggacagctctgcccttgaggcccttcagaaatttgtgctgatttggtccctgtgccagggcacagggggtcaggcactgtggaaagaagggactcaggtgagggtcttctggactctaagacggtaaaggcactaaagtcactttaaagcttttggagaagcaggagggcattggcttaaccaagccgaaggctgctggctgggctgcctagcccagctaagatcttccttcagcccacctcaggatccgggcttgagggctgcagggcctgcgtgcgctccctcccccgaaatcacttctcagggcaaaggagccccaggcatctcatgctttgcccttcttagggctcaggttcttgccttagcacatagcttctgggagcttttttgaagcatttcataagggccaaggaagtggggcagggcttttctgatccaaagaaaacaaagtttctctggttacccctcttcccttgttatctaagctttcctcagttgtcatctcttcccagctctttggtccaagagggggctgagtttggtgccagctggcaaatgagggctggactctcttccctccagagaccaccccgctccttgctgcagctgaaagtagttccccaggctgccctcggtggtgaggactggatgctagactgctgagctgtggtctgggctcagttgagaagataggatctccctagatcatggcaaggcctgacaacagctgagccaggaaagtgctgctgaggcaagtcgacatagctcacagggaactctgggaagcctgggatgtaggcgctggagctccagttcccaggagcaggggcaggtgttcctagatgttagtgttgtggatgtccttggtcttctgaagattcaggtcctcctctccgggtagcttagaagtaaggaggttggtttgattcaatagtatggggacagaatggggacagcaagggcagaagtgtcctctccacgtaactcattatgcccctcctgggggagattgcatctccaggacaagcatctaaaggaggcccctgctgtgcagaggggtattgttcctgtctctttcattgtcctccctcctctcaaactctccagtgtggtgtgaactcagaagaaacggttactggggctgcatggagaatttcacctgcggtgattttgatccagggactgcatctcctctttcctcatcacagccagtgctgagaggctccttctacctgccgcagggtaggagggccaggcaaagttcaccagcttgctctaagagcaagcaggcaatgccgtaaagcctgagcctgcctgaggtgctgcctcctcccaggtggtgcgggggctggtgggcgggcgggcaggcgtgctgacagccggcagtttgcgtgggctgtgccatctgatgtctattcccagccctgggaggaagggggagtcatttatattctgcaggaggaaggggccccagctgtcgcctttctgaccagcaggcctggagggcaggggcacagagcagagaggagggcactggtggtctcctgcttagcctggtctgactgcagtgtagggaataggtcaccaggaggagcccttcatcctggcaggccggattgtggagggacttccctccccctcttttccatttctccctccatcaccacctgccctcacatcctggggcagcagctggacagccattagacctcagtgccagggcactcttcctccagctgggatctcagtggctcccagctgcatgggctcctgcttgtgtgttccctcctccgccatcctctgttccccgcacctcccttattctgctcatgtctggggtattcacttggctcctcagcaaggaagcaaacgccttggaggagaagcacatggttgcccttttgtccttgctccctggctagggaaagctgctagtggtcagcctgttttgcctttttttttaaaaaaaaaaagccagggcagggtgcttagattttaaaaatttgcgtgtcatttgcacaaattttcatatcaagctaagtcctgattccaaatttgattatattccaaatttgattatattccaaatttgattatattcagattcaaccttgaggacattagaaatatagatggcttctgtatccaaatctgaatggaaatgagattacccttctgggttcagatacccctcccaagcccccgtcttttctgtaaccacccctcctctgagccccatcatggctggggttggtatggaatgggagcagctctgtatctggggaagtcctccagcctcaccttcttggctcttaagtggtaggctgttaccacttgccagcctgggcctcctctctccccaccctttcacaaggcaggctgcccttccgcactcactggcccatcccttctttctcatcgtcccacccttccacccccgtgcatggctgctgtaggtctggtttttttggtttttgttttttttaagacggagtctcactctgccgccaggctggagtgcagtggcagaatcttggctcactgcaacctctgcctcccgggttcaagcgattctcctgcctcagcctcccgagtagctgggactacaggcacgtgccaccatatccagctaatttttgtatttttagtagagatggggtttcaccatgttggccaggatctcttgacctcgtgatctgcccgcctcggcctcccaaagtgctgtgattacaggcgtgagccaccgtgcctagccaggtcttgttttgaaaacctcactgtgggagattcaggcatcctccctaagccagctggccgctgtgctaaagcctgttcagagttaataataatcattagctgaatggtgctggggcctttcagcttcagatctctaagcacttgcaggctgagtcagtcagccctcatcttccccctccttcctgggctgcagagtgtaacagaatgggaaggcactgtgggaaggaagtcaggaatcttgctgctagccacgccttgcagtgacttctcgtctgggagtgggcactgagtcctctcagtaaactaataagacttgcacctgacaaaggtcaagatatgtagggaacacagtgtatgctaggctgagacctatggtggtggcaggggtggctgttgagcctgaacttccagtactcctgcccttccttctgtttacctggcttggcctacagggggcacccctggtcttgatgcctcaagcccagcatttctgggtcccctctgcaagctcagagagcagggaggcttctggtagtgctcttgatgctcctgtgtctggttggcacaaagatcctgtgtaacatgaaatgaaaggtgcatcagcttgggggctgggaaacctgcagtatgggtttactccgtccctatcactggtgtggctgtgggcaaaccacttattgcctgacctacctcacagggatgttgtgagggtttgatgagagaatgaatgttaataggaattggaaaattcaaagcattaaacacatgtaaacaggtggtattattatgttcttgtccttctctttcactgagccaggctttgggctttatgcttcttaggcaataaacagttatggataatgacaggggatctaagtctcagagagttgttctggccatcataagaaaacatggacacatttcttccttccagatgcaaggtcagctcttaccaactcctgccagaaatgccaccacggccatgactagtgaagtttgccgtaagtgctgcctacctggtgttcccaaatcacagggcagactgcagatctcggagtcagtacaattcctccctaggtccagcctgaagttcctggagctggtcttcgtagggagctgcaggtcacaagtctatctaaatctctcctaattctgcccttctgagggaaaagtggagcagacaagctaggaagggaggagcaactggagcaaacagcatcgccacagaccctctgtttaccgaagccacagaatgagcaacacctgcctcaggcattggagatgcagagcagggacccctggcttcccagggtccacagcctggtttccctttccccatttcaggctcgtggaataggatcagtcccctcctcctccaagtgctttattggcattcacatacacacacacacacacacgcacacacacacactgaaagcagttctgtttaagttttaaattggggaagaatactttccattccatttgtctgagagcagcagcagtctgcctggagtggatgcaaagaagcaggaacagcaaaacagcagtgcagaggcttgaatattcgttttttatcttaattgctttttctgtcctgggatccaggaatgaaacactagtcaggcattgtgtgcagagcctcagcagttctcaccagcactgcacaaagacgacaagctgaaaggcagaactgccctggagggtggtttgaagtagcccgtctccagcatggcgctgggcttaaccccttcatgtaggcagaaattacctccagtgaggggaccttccccctacccacccactcaggagactcagctagtcaccagatgcatcacagaataacaatctcagtttataatcctgctattgctaggatttcccagatgagtttttaacctctgttggaagcagattaaggaacgacttcaggctattcagtggcatctgaggagccaactctgtctcactgagtatacatgagtggccccctagcacccctatctttaaagcagatacccagttatctcatggtgctttctaaggatgctcagttctgctcaggccccccaaaagcaaactatgaccaagtgagggagcagtgggaggtaagggaaatgcagcacaaagtacaatccaactccagtacttgccaacctgtatgtgtgcgcacatgcacgcatacaccagccttggaggcaatgactcctgcctaatgtatgccagtgccaaagggcatccagaagtcccactgcagggctccacgtcctggctcactgcaggttggttctctcaggccatggttccaaccagggagagtaaacaagctgactagattggaggcgtcagggcaggtctaagtgtcttcaccattttgcattttccacctaagagtgtagaagcctgatgaaggggcttgactggcagctgctttagccttcctctctcaagccccaggagaggaagcattcagcacaggctgactgtgactagaccagaaaagccaaccgtcccactgcaggggcctgagccttttctgctatgtgggtggagaaagtgaagcttccccactggtttcctgggagatacaagataagtggtgcaagaagtgcatgcagaaagggaaggagttgagagactggggggaagagaggccaggttaaccaatgcactgaactcttacctattctcaaagaaaactgtcatattagcctcctccctccccgcaagtgctacctaagaggagccagggtaagtgctgcaaggcatggcagacaaaattgcacatcttggccagaatctaaggaacttcttgtggtttgggggaggtggtgaggatgtgggtggtgggtgggtggggggtgttgaagagatgcagccatggacttccttgggcttggcacaggccaaaacagaagagagaactccaaactccaagtagtcctcatcagacttgctctccttatcagcttcatcctgtcagccaaattgtcagccatagaaaaactgctttgcagatgaaaaactatataaatgcagagtatgggagtgctctgacatcaacagctgtcatttcactgactgccaaggttgacttgtctgatgtggctggttgtgcagtagctccacccctcgtcaccttggttgttcctcctgaagtgaaaaacaactttccaaatagaggagggctgcccttcggtcaagactttaggtaagtattcaaattcgcattcttttaatttttttcctggtatcatttcctctccctctttggaatctgccacgacagcccccttctagaatcaccaagagaggagccaaagaatcagcatggttagagttttagagtccagtccaatttctggtaggctgaatctgtaccaaaacgtagggactgcatttttctgttccacgcaatgcctaggacacactaaactgtcaaggaagattaacctgcccattaggtgaatatacttttagcctaagatggctaccatttacaacatgaaaatactgataataaaattctgtgaaagtgagctgctgcccaccattttttaaaacccaatccaagcattttttccatggtatggtcagtaggcttgatccagacttttaagagaactcggcagggaggcaaccctctgccctagggatccaggaagacttcattatctacaagcctcagcgagcgccaagtcatgggatttctaaactctaaagcttcagtgacatttgagaatcttaggggtcagcaaagtatggtctgttggtcaaaccagcccactgcctggttttatgtggcctgtgagctaatagtagtttatatatatatatatatatatatataacattttttttttttgagatggagtcttgctctgttgcccaggctggagtgcagtggcgctatcttggctaactgcaagctccacctcccgggttcaccccattctcctgcctcagcctcctgcgtagctgggactacaggcgcccaccaccacacccggctaattttttgtatttttagtggagacggggtttcaccgtgttagccaagatggtctcgatctcctgaccttgtgatccacctgtctcggcctcccaaagtgctgggattacaggcgtgagccaccgcgcccggcctagtttatatattttttaatgcttggaaaaactcaaaaggcatgttaaaatatgaaattcaaatttcaatgtccataagtcaaatcttttttggaccacagccacagtcattcatttttgtcctgtctgtggctacactcaagctatagcagcacagctgagttgtaacagagactgtgtggtctgcagagcctaaaatatttactatctggctcgttagggaaaatgtttgctgaccccggtccatcttaatgcctagatgtgtatttcacccatgtccgtacaatagcacttaaagattttcttcctagataggacacacccttctgaggtacagtgaaccccacccacaggctgaaaaaataaaccagtcagattgtgccagaacagagactcaagccaggtttaatgatcattgtctagttttcagagcccagaggctccaagatttgccagcctaggtgtacacaagtgggaggaatggggtcttggacacgggaggcctgcttgctttgtcagcagagctacgaggaagtacagaggtaagaacacacagaaaactggatccatctgctttgctctccccagctggggtgtaccctctcctggcccctttcttgggccccataaatacaaaataataataataataataattacacagattgtagagccctgtcatcctctgtctccagggacacctgcttcctgggagacatgtctggtttatgggtgtggggtagggtaagaggaggtggtgatctctcggccttttcttatacccacacctggcagttttcaacacagggttctagtgcgcttacatatgctgattattcaattctccaattaaaaagctacctttgggttctatcacctgaaaccacgggaagaaacaaatcaaatctcttggtagggcagccaggtacatctaccaggtgtctcaaactcaaggccaaactagtggatatagtcaggagacttaagagccacagggccttttctcattccctaaactgggtaggaattatgaagaaaacggccctcccagtcctcaggagctccatcacgatgccccagaaggcctgcttcatttaacgctcactttaaagatcttcagagccctagatggtgccaagcggggagactgcagcatggagatgagattttcccagatttcctgatgagtctgaggagggagtcctagttcctatagctccagtaacaaaattctcaggagtctctggaataaatcaagacaacttttctctcctgaggacagttaacaggaagagcagctcacagctacttagccccttgccagtttccttctgagtccttcaatgacctagttctatcttaattgctcatatattgctcatatatatagtcttcacgggaggtttctgaggagtccaaagaaccaggtagctccttaccacctcttctcccaaggccttcaacccatggttcttctaactccagcctgggcagaaaagtgattcagtgccatggagatgtgggtgaagcttcagggagttcagaaatgaaaatacaggagtgtgtatttgaagagcctggcatggtcactgtctctcctaaagaggaatacaattgtgtgcatgaagttgtgcacattggtggagaccattctgagagtatcattaatggggactacagattcactgtcctggtggaagtcaaggtgctggtgtgcatgcatacctataagcatgcatacctatgagcatgcaggtacttgagggaaatgctgcacctctctctcaacaaaactaggttactaataaaggatggacagcagtcttgagttcccaggaccagacaaggggaagatgttgagtccccttccccaatcataataggaagcttaatagtcaggccctccaagcccctcacccacaggtaaatgacacctcttagaatgta

SEQ ID NO: 2056 - protein, 1130 aa, Homo sapiens
  MOD_RES (5)..(37): Variable amino acid
MTVGXXXXXXXXXXXXXXXXXXXXXXXXXXXXXXXXXPPSGPPPAEGSRRLEPPSGSPAPQTKDPPGPSARPLRHLRASGETLGSSAPVTWASVIADMSIFGHCPAHDDFYLVVCNHCSQVVKPQAFQKHCGEGSPREEIKGQGKVEHGTLRTGQPPLSVCSLFVPVVNLEKMSSLPKPDGHGIRVAPPSAFLSQPGGLTKDSPGKPPMAPPSKEPPGRENIEIIPSEGSSHWAEGSPPEKEPSGTRLPPKTHRKMARKECDLNRQCGVINPETKKICTRLLTCKVTPFPLHVHQRREVQGRAKDFDVLVAELKANSRKGESPKEKSPGRKEQVLERPSQELPSSVQVVAAVAAPSSTFSVRAKQTYPYCALPRSRASSESELDDEGPCGGDGDPGLFPFPMPRGGTQASSEESEEEGTSDDLHPPPDCHYATRPPRPQAFCTFGSRLVSPGCYVFSRRLDRFCSALSSMLERHLSTHMWKKIPPAAEPPAHLVNSPLSAPLSPSSTGTCPRLPGPTLRPACPASMPPTKDNLVPSYPAGSPSVAAACSQAECMGGSQAITSPLPANTPSPSFSKLPPSKASKSSKGKDGVEVEAPSRKRKLSPGPTTLKRTCILEPTGKGKPSGCRGLSAKTKTALSMGLNGTMGPRVKRAGPLDCRGSPHQLPTPVKASQLENRGAAGHPAKALPTNCLSEEEVAKKRKNLATYCRPVKAKHCQAGAPADVACSVRRKKPGPALAFEEKCSTLKRALWATPPHCRRRPRGGASPAAATASAIANPEDVFGQLECTGPRATAMQPLEVGLVPAPAGEPRLTRWLRRGSGILAHLVALGFTIFLTALSRPGTKTGPLMEDRSEGGRARWVMPEIPALWEADAGGSLEFCLCMAEAILLFSPEHSLFFFCSRKARIRLHWAGQTLAILCAALGLGFIISSRTRSELPHLVSWHSWVGALTLLATAVQALCGLCLLCPRAARVSRVARLKLYHLTCGLVVYLMATVTVLLGMYSVWFQAQIKGAAWYLCLALPVYPALVIMHQISRSYLPRKKMEILGRKVIQCHGDVGEASGSSEMKIQECVFEEPGMVTVSPKEEYNCVHEVVHIGGDHSESIINGDYRFTVLVEVKVLVCMHTYKHAYL

SEQ ID NO: 2057 - DNA, 9577 bp, Homo sapiens
  source
  (1)..(9577)
  CDS (201)..(425)
  CDS (462)..(828)
  CDS (879)..(1082)
  CDS (1282)..(1552)
  CDS (1589)..(1799)
  CDS (4456)..(4581)
  CDS (4787)..(5123)
  CDS (6216)..(6334)
  CDS (7958)..(8265)
  CDS (9323)..(9377)
aagggggacctgtgggggccttgaatatggggagaagggatatgggatggccgagctgccttgcccagaggcaggggaggggcagcctgtgccctgggccctccgaaggtccacttgaggtttgacgggaggctggggccagcggccaggccgtgtcctgttaaaggctcaggcgggagcaatgtgcccgttttgggaggatggggggcaaggatggtggggtgatgcctgcgatgtcccccgggggagaccttggccttgtgtccgacatcttgtcatcacagacagagcccaagcgtgttacctcacggggggctgtcttaactattttccagtgtgcatgccaggcagctctgagacgggaaactgctcgtgtgtgcgcggtctgtggacgcagccccgctcccctctgtgcttccgcccgtgtgagacgtgctcctgtgtggccgtgacctgtgaagaccctgcgtgacccgtggggcgtgaggctcggggagggcagggctggggctctggccgggggcgtcatcctgagactggccagcgtcgggctcctagacccgagtttccttgtctgcgtggtgggggtaacctgtctgcatctgtgtcacgtgatggccgccgggattcaacgtgtgagtcactccacacgatgcctgatgcgtgcgatgttccccaagctcgtagctgtcatcgccgtgaccgtgaggctccttcagcagagtggaaggcctcaccccggacggagcgtggaggccaggagggaggatggctggccggtccgggacggcgtcgctctgcccctccggccgattctcagtcccattggtcagcggctgggccgtgacggagaggcctgcgctgctgttgagggccaggtcgtgggttgaagtgcggggcccgggctcgagcgtcggaagcctgcgggggtcgtgggttgaagcgcggggccccggctcgagcgtgggaagcctgcgggggtcgtgggttgaagcgcggggcccgggctcgagcgtgggaagcttgcctgtttgtcgtgtgggaccggccgcggagatgccggctgttcacttggaacgaaggtgcctgccctgtgtgtgccgggtagtttgggggattgtcttcctgttcgtggcttccggcgtgttcccagcatcctgagggttgaggcttggaggacaggaatgatcttcggcttgagaaaccactgtgggcaggttttaccagggaaccccttaagctgtgaaagagctgcagtgcaagcttctagtttccacgcagaccgcgccagagaacccgccgggccgcctcgggacggcagcagaggacccgccgggacgcctcagcaccgacacgcgcccagccatgaggccgcctttagcacggagcgtcgagcggaaacggcggtgcccggaacgcggatgccctttgcagggctggagctcagctctgccttccgacaacacttggctgacagctctgggagtctcaaaacggtgcctttgtggaggggagggccctggacatcctcagaggaggaagcgcgtcctgggtagggtgggcggcacctgttcaacacgcctaacagatgcaaggtcgaaggaggaggggcctgcagatctgagcttgtcgccgaggaactctctggaaatggctcccgctggcccctgcgtgcgacccctacgctcaccagcccgtgtgccgagctttctctgttgatttcggagtgggttctggttcctgcctccctagtgggctctgagtggcagggccctgccgaccgctggcctcagcagcgggtgatggagtgtgggccctgcaggaggaggctctgtccttgatggctcctgggtgagggggtgtgagggaggcggccagcacaaggcgggtgggccctgagaagcccctctgtttcccctttagcctgagaaagctgtacccacagagctggaggagggagtggctcaggatgctgcttagcaaataggttggtctggagtctgggaaatggagggttagactttttgttttctgaagctgggatgggtcgtgcttttaattcgtccaggagaacatggggctgaagagctctctgctcttgtggcccctgatgggagtgctctgaggtctggcaggccacagagctgctgggacggcctcagccccaaacctgcgcctgtcgcttcccggggccaggccagaggtttcccagtgagagctttggggtcgacatttccaggaggagaaggcacttctgaaatagcgtgcccttggtgagcttgtgtggcttttctttctctgtaacctgctctgagttgtcccattgagtgttctggggatgtgggcatctggagcctgtggagaggacgggactgggggtgcgtgggggagacgcccctgccaaggacaggggagaccccctcagtcccacctgggagagtctgtgcgcggggctgtggttgattggctggcaagtttgaatgcggatcaatgtgccacttgtttctaagtcagcagggcccctgcccccacacactgagtggctggattctgggagccttttcctgtggagagtggagctggagtgtggggcgcagggccatggccctgttccagcgtcggggagctagtgtgcaggtgctttctcctgttagcagtgggcctgtgctgtgctccctgtggggttaggcggccccggtgggagcttcagtcttgaaaggggctcatagccctggggtgcaggctgctgtgcgtggggggcatcacacgcaggtccccaggatgatgtgtggtggaggacggggcgacgggagctctccacagagcttcatgtcccttctgttgtctaaaccacagaccccgtgccaggtgaggggctggggtgggtgaggctaaggtacctgccccgaggcctcggggcacttggcggcccctccacccccacaggagacatcggcttgagtggagaggccagcctctgagaaggcttctctctggccaccagctgcccagagctcccagcccagggccagcagcttgtgctggccccagacaggggatgctgggcggcctctcgcagggggagtggtggttttcagacagtggctgcctcgctttggggatgaggatgttttccagacgtgctctggaactgacattaggctctgctgcctacccagcttgaacaaaattaggtctttcatttttttgggttgctgggaatggctttgtggatgcataggagagcatggttgctccaggaagtccggcggggagtgggttgaacaatcggagtctcccatccctgaatcatctcagtgggggcggacgggcagctcctgggggtgtggcaggggctgggctccaggctgcccagcctgcagggagcctccttctagattcttcctctgtatctgtggcgtggaggcatctgctgcctctgtctgcccccgcctcatcctccaggtcttctctagttttgttcctccccatggagcccttacccgtgacgtaagctgaacacctgagaactttcgagcttgcttttctgtttaggtttggaaaaaacatgagaagggtgagtgggagcaaaaggccagtttctgcctggctccctgtcctgggaggaggtggggagaagcctcgggcagggatgagaggttgggatgtctgccctgaggggctgtgggcgggaggccggaggcgcctggttaatgtgtttctgcccctgtgtgcgggtgcagggttctaagctgggactcagggtgcagagggcacgtgtgtgggactttaaagtttgtcatggaggctgagccctggggaagggcagcagcactcggccggctgggcttccttctcctggagtagggtggtcagggaggcagggatatcggggagcgccaccccaggacggagcaggaggcagcctggagtcccctttgtagaccagataaggccaggcagggcctgatgtccgtattctattatttatttattttaagtgtgggggtctcgctctgtggcccaggctgagtgcagtggtgtgattgtagctcactgcagcccagaactcctgggcctgagcgatcctcctgccttgacctcctgagtagctgggagatgacccccttcttacccgttcttccagaataggtcaaattcacatgacatgtgcacacacacacacacacacacacacacacacagaaaagacacccacggaaaccctgaaatatataaaatgatgtccagccagtatgatttgccccctctgcgctgccccatctccgtaccgggtcagccatggcccatctcctggagccgttctctgcatgcgtgccacggtacagcatgtgtgtgtctgtgtgtgttcactcacttcttttcacatgtgtggagtcactccgtgtcctgccttgtgcgtgtggccccctctccctgcatgtccccctctaggctccgtcgggcgctcacgacttctctgaccggtttgcagtgatggaccttgaagcaggtgctaggactttgccgctgcaaatggtgctgcgtggggctccatgcacatcttcacgcaaggtgcaggtcggcaggatgaattcctagaagctgcctggtggctgtaaaaatgttctcatcccaaaggaccaaatatgcagagaagtttaacactcacttttcctgtcattgaaaagttacatttttgtggaaacccgtccaggctggagacagaaggtgtgtgcagggagaggaggctctggggcaccactctaggctgcctgctgctcaggtggttgatgtgggggcagatgccctgttccttggggtaggtgccacctcctccctgctccctggggtaggtgcattttcctccctgctgcctggggtaggtgccgcctcctccctgctccctggggtagatgcagcctcctccctgctgcctggggtaggtgccacctcctccctgctgcctggggtaggtgcagcctcctccctgctgcctggggtaggtgctgcctcctccctgctgcctggggtagatgcagcctcctccctgctccctggggtagatgcagcctcctccctgctccctggggtaggtgcagcctcctccctgctgccccggggtaggtgcagcctcttccctgctccctggggtgggtgcagcctcttccctgctccctggggtgggtgcagcctcctccctgctccctggggtagatgcagcctcctccctgctgcctggggtaggtgcagcctcctccctgctgcctggggtaggtgctgcctcctccctgctgcctggggtagatgcagcctcctccctgctccctggggtaggtgcagcctcctccctgctccctggggtaggtgcagcctcctccctgctgccccggggtaggtgctgcctcctccctgctgccccggggtaggtgcagcctcttccctgctccctggggtgggtgcagcctcttccctgctccctggggtaggtgcagcctcctccctgctccctggggtaggtgcagcctcctgcctgctgcccggggtaggtacagcctcctcctccctgctgcccggggtaggtgcagcctcctcctccctgctgcctggggtaggtgatatttctgccctcctacctgattaggctctggggccactcttggggatgggggaggagggccggcccccggggtgctggccatggtcctgaccaggagctgcagttgcggctcctcgtgggccagaggatccccttgtgtgattcttgtttggcatccgcccaggccatagagtcaggggcttggctcacctctgggcagctatggggaaggggctggtgtttgggaggtgcccgaggaatgatcggtggggggtggctgctggggcaaggtacacgaccggcttctctcctttacaattagcactgagccagcttatctgagaccatcccttcccacgggtgccatttaattagccaagagctgagttaagatcacgtgaagaaagttgggggggccttggcctgagcggcgggtggacagggctgcgtctgtcagggtgagggggtctggcggcccctgccgccctcgtttcttaaataaacgtttggtcgtggcttattttcttctgactgcaaagtaagcacatccaccgcaggagactgggaaagcgtggaaaacagggaaggacgtttgctcttcctggtttctttccaggtgtctgcgcccgcctgtgcgtttctaaacagaataggattcaggcggtcccgtcccgctgtggtgttaacggcatactgtccacacttctcatgggcaagatgagtctcgcgtgccaggtagttggcttgtctctgacctggggctgccgcagcacctgtccagccacctgtggacatggatgacggcagagtccctgtgttgtgtggtgtccctgcgtggatgtcgacaccacagctgtcctggggacgtgtccacatgaggcttggggaatccacatgtgtcccatccagggctgtcctgcaggccccgggtctgcctgaatgtgattaggtgatgaggccaccctggccaggaaggctggtgaggggagagggaggacgcaggctggcccaggaggggcttgtgttggaacgagattctttctgtggggtgagccctccgtcgccggaggtgtgcaagtggaggccgagagagagcactcactaggacgtttgtagggggccagggactggagctgtgagccgtggaccagctgagggcactggcctgcttgggagggggttaggcgtggctgtctcagggggctgtgggggggaaggcctgctgggagcctcggtcaggagtgccactgttggggtgccctcagcacctgaatgggtttcgggtggggctgacaggcagcttgagcccatgaagggagtgtgggatgtctcaggaggagcccccttgttgagggtggggggagcccctctccaccccagctcccctgggacctcatgaagcctttgctccccaaagctgctaagggcttgggtaaggccagggagggacctgcagggtcaggagcccaggccaggccaagcaggggtccccaaaggtgctggggatgggggtgtgcatgacagggaagctccggggctcgggtttggggaggagtaggctgggctgggatggggacactggccagggccagagccaagcttcagccacagaagaaggggcgattctacagctcacaaggtccccgggtgccgtctgcttcctgtagtgtaaacgcacctgtccacattccagccttcctaccgagacaacagcaccatggactggaggagtctggaggggacaaggtgtggtgagtgttaactctccccacccaaagctatcctattcagagagaaactgaggcacaggtgggtggacaccctaggcacagagccactgatgggcaggcaggttacctgtgtgcgcttgctgtcccagaccttgacaacacggtttattttgttttttaaaaatagaggttaaattatcctaacatgcagatagcattttaaagcgagtaattcagaggcgtttagagtggagaatttagtgatggtctgccgccaccagccctatttgaaaacttgtcaccccatgtggacactcttgccctctgccatcgtgtgccccaccctgtccctggcagttgccggtctcctgcctgtctctgtgacgtgcctgttattttattttatttaatttatttatttttgaggcagggtctcttttcgcccaggctggagtgcagtgtctcaatcacagctcactgcagcctggacctcctggactcgagccatcctccagcctccgtctcccgagtcgctgggactgcaggtgccccaccacatctggctaacttaaatcatttgtagagatggggtctcattgtgttacccaggctggtctcgaactcctaggcccaagctgtcctcctgcctcggcctcgccaagctctgggagtacaggcgtggccgccgggcctggcctgtttgcttcggatgtttcgtgtaagtggagttgtcatcgtggtgccgttttgtgcctggctttccttgccgagcctgccctcaggttccttcgtgtttagggtactccttcatcctctccgtgtctgggggccgctgcctcgtccttcctgtggccgcacggacggacctcagtttatctacccacccaccaactggatgttgggttgcgtctgccgtgaggctgctgtggacacgcggtgagtgtctctggacatttcgtcattcctcttgggacgaagcctgcgtcacatgtggccaggtgccctgggtgggccgtgccctcctcatctcagccccccagacccacacaggccccctcccggagccctcgccttgctcttcccgctgtgcggaaggtggtgcagtgacgcctgagtgtgggccccaggcctagctgccagcctgggctctcgagcaggttcaacttggccagggcagggtcttggctgccgcctgcctggatgtggggagacgcctctgtgcaggttctgggctgggcacttggggccactgtctgagcagaggatgtggggtcctgcctccgggagggcgagcagaccgctgctctggggggacagtgctcggtcaggctcagggccctggagagaatacaccagggagacttgggggctgcccggggaagggatggtcgggcagcctttcagagaaagtgacctgagattgaagcctgggggatgagggggcggctctgggacctgcgggtaggagaggattccaggcagcaggaagtgcacgtgcaaaggccctggggcagggacggcgtttgccgagggcaggaggggagcagggtggatgggtcgcgtggggtccaccatgaggcactgcagcggcctcgagggccaggccagggtggggtctatcttcagggcctggggctcgcctatgctggctgccattcccacccagcttctccacatgcttctgggatcaaagtggctggtacaggggcgcttctctgcgggctcagtgggttgggatggggcagtggagagtgggtagccggggcatgccgggaggaagagtaaagtccaggggaccccaggccaggggctgcgagcccagggaggttgcggggtcggggagggcgggccaggacctctgcatggggctgggctgggcactttggccagccctgcttggtgcaccggctgggtctctgtccagcacctgtggtctgggtgggacaggtgactaatggagaacaaatgagccctgcggagcttccgtctccagggaccgtgagcaggcgctgcgaagtcacgaggcagtgcccggggagctgatttaaccacgtgctgagccagcgggtttcctgccagggcctgggagtctgcccacagctgcagctcccagagcccctggggtgcatggcggatgccccctctttctgggccggggcgaaggccctggaaggacctgtggttgctgcagcaatgcagggggctgggggtccctgtgggccttgggcgtctgctgcgggagtggtta

SEQ ID NO: 2058 - protein, 740 aa, Homo sapiens
MGGKDGGVMPAMSPGGDLGLVSDILSSQTEPKRVTSRGAVLTIFQCACQAALRRETARVCAVCGRSPAPLCASARTLRDPWGVRLGEGRAGALAGGVILRLASVGLLDPSFLVCVVGVTCLHLCHVMAAGIQRVSHSTRCLMRAMFPKLVAVIAVTVRLLQQSGRPHPGRSVEARREDGWPVRDGVALPLRPILSPIGRGLKCGARARASEACGGRGLKRGAPARAWEACGGRGLKRGARARAWEACLFVVWDRPRRCRLFTWNEDRAREPAGPPRDGSRGPAGTPQHRHAPSHEAAFSTERRAETAVPGTRMPFAGLELSSAFRQHLADSSGSLKTVPLWRGGPWTSSEEEARPGCKVEGGGACRSELVAEELSGNGSRWPLRATPTLTSPCAELSLLISEWVLVPASLVGSEWQGPADRWPQQRAPSGAHDFSDRFAVMDLEAGARTLPLQMVLRGAPCTSSRKVQVVDVGADALFLGVGATSSLLPGVGAFSSLLPGVGAASSLLPGVDAASSLLPGVGATSSLLPGVGAASSLLPGVGAASSLLPGVDAASSLLPGVDAASSLLPGVGAASSLLPRGVCARLCVSKQNRIQAVPSRCGVNGILSTLLMGKMSLACQAQAVLLPRPRQALGVQAWPPGLACLLRMFRVSGVVIVVPFCAWLSLPSLPSGSFVFRVLLHPLRVWGPLPRPSCGRTDGPQFIYPPTNWMLGCVCREAAVDTRDREQALRSHEAVPGELI

SEQ ID NO: 2059 - DNA, 1192 bp, Homo sapiens
  source
  (1)..(1192)
  CDS (201)..(992)
tctcctcagcacactgcttaaagtattagccatgcctaatctacatatatccttatacacctccacactcgttgatttttcactaacgcctcttaatttgtcgatatttatgtaggcccccactcattcacctaggtttatttttcatataaacaagccctcgtatatattttatatgtccatccacattatacccacgtatgtacattcaatatatgtatatatacctgtctgtatcttcaagatatgtatatacacccgtgtgtattttttatatatgtatatatgcacgtgtgcataccttacatatgtacatatacgcgtgtgtatatattacatatgtatatatacacgtgtgtacacattacatatgtatatacacacgtgtgtatatattacatcacgcatatacacacctgtgtatatatacatatgtaatatatacacgtgtgtatatattacatgtgtatatatacacgtgtgtatatattacatgtgtatatatacacgtgtgtatatattacatgtgtatatatacacgtgtgtatatattacatgtgtatatatacacgtgtgtatatattacatgtgtatatatacacgtgtgtatatattacatgtgtatatatgcacgtgtgtatatatacatgtgtatatatacacatatgtgtatatattatatatgtatatatacacatatgtgtatatattatatatgtatatatacacatatgtgtatatattatatatgtatatatacgcatgtgtatatattatatatgtatatatatgcatatgtatatatgtgtatatatgtatatatgtgtatatatgtatatacatatatgtgtatatatgtatatatgtgtatatatgtatatgcatatatgggtatatatatgtgtatatatgtatatacatatataatctatatattaatacataggcatataaatatgtatatatgtatatgtaattttgtatatatgtaattttgtatatatgtatgtgtatatatgtattagaaaattacatatagatattatatataaagttaagagatgtgaagaatacatgtaagaagtcaatgaatatttatttcccaccaaataaataactggaaaaataatttttaaaattactaatctgaacagttttgagtctttatgtgaaaagggccaatgagtactaa

SEQ ID NO: 2060 - protein, 263 aa, Homo sapiens
MYIQYMYIYLSVSSRYVYTPVCIFYICIYARVHTLHMYIYACVYITYVYIHVCTHYICIYTRVYILHHAYTHLCIYTYVIYTRVYILHVYIYTCVYITCVYIHVCIYYMCIYTRVYILHVYIYTCVYITCVYIHVCIYYMCIYARVYIYMCIYTHMCIYYICIYTHMCIYYICIYTHMCIYYICIYTHVYILYMYIYAYVYMCIYVYMCIYVYTYMCIYVYMCIYVYAYMGIYMCIYVYTYIIYILIHRHINMYICICNFVYM

SEQ ID NO: 2061 - DNA, 1225 bp, Homo sapiens
  source
  (1)..(1225)
  CDS (201)..(1025)
gtgaaaacataagatgtttggttttccattcctcagttacttcacttagaataataatctccaaactcatccaggtcactgcaaatgctgttaattaattccttttcatgactgagtagtattccacatatacatattccatatatattcattccatatatatattccatatatgctcattccatatacatattccatatatgctcattccatatacatattccatatatactcattccatatacgtattccatacgtatgtactccatatacgtattccatacgtatgtactccatatacgtattccatgtatgtattccatacgtatgtattccatgtatgtattccatgtatattttccatatgtatatattccatgtatatattccatatgtatatattccatatatattccttatgtatatattctgtatgtatatactccatgtatatattccgtatatctatattccatatatgtattccgtatgtatatattccatatgtactccatatgtattccatatgttccatatatattccatatattccatataaattccatatattccatatatatcccatatacattccatatattccacatatattccatatacattccatatattccacatatattccgtatattccatatagattccatacatttattccatatatattccatatagattccatatatattcagatatattccatatttatattccatatatggaatatatatgtattccatatatatgtattccgtatatgtatgtattccacatatatattccatatatgtatgtattccacatatatattccatatacgtatattccagatatatactccatatgtatatcccagatatatatattccagatgtatatattccacatatatattccagatgtatatattccatgtgtgtatattccatatatgtatattccatgtgtgtatattccatgtgtattccatatatatattccatgtgtgtattccatatatatagtccatgtgtgtattccctatatatattccctatatatatattccctatatatattccctatgtacattccatatatatattccccatgtacattccatatatattccccatatatattccatatatattccccatatatattccatatatatattccccatatatattccatatatatattccccatatatattccatat

SEQ ID NO: 2062 - protein, 274 aa, Homo sapiens
MLIPYTYSIYTHSIYVFHTYVLHIRIPYVCTPYTYSMYVFHTYVFHVCIPCIFSICIYSMYIFHMYIFHIYSLCIYSVCIYSMYIFRISIFHICIPYVYIPYVLHMYSICSIYIPYIPYKFHIFHIYPIYIPYIPHIFHIHSIYSTYIPYIPYRFHTFIPYIFHIDSIYIQIYSIFIFHIWNIYVFHIYVFRICMYSTYIFHICMYSTYIFHIRIFQIYTPYVYPRYIYSRCIYSTYIFQMYIFHVCIFHICIFHVCIFHVYSIYIFHVCIPYI

SEQ ID NO: 2063 - DNA, 1177 bp, Homo sapiens
  source
  (1)..(1177)
  CDS (201)..(977)
atatatgtatatacatatgtgtatgtgtatatatgtatatacatatgtgtatgtgtatatatgtatatacatatgtgtatgtgtatatatgtatatacatatgtgtatgtgtatatatgtatatacatatgtgtatgtgtgtatatgtatatacatatgtgtatgtgtgtatatgtatatacatatgtgtatgtgtgtagatgtatatacatatgtgtatgtgtgtagatgtatatacatatattatatgtatgtgtgtagatgtatatacatatattatatgtatgtgtgtagatgtatatacatatattatatgtatgtgtgtagatgtatatacatatattatatgtatgtgtgtagatgtatatacatatattatatgtatgtgtgtagatgtatatacatatattatatgtatgtgtgtagatgtatatacatatattttatgtatgtgtgtagatgtatatacatatattttatgtatgtgtgtagatgtatatacatatattatatgtatgtgtgtagatgtatatacatatattatatgtatgtgtgtagatgtatatacatatattatatgtatgtgtgtagatgtatatacatatattatatgtatgtgtgtagatgtatatacacatattagatgtatgtgtgtagatgtatatacatatattatatgtatgtgtgtagatgtatatacgtatattatatgcatgtatatacgtatattatatgcatgtatatacgtatattatatgcatgtatatacgtatattatatgcatgtatatacgtatattatatgcatgtataatatacgtatatacgtatatatgtatgtatatacgtatatacgtatattatatgtatgtatatatgcatatacctatattatgtatatacgtatatacctatattatgtatatacgtatattatgtgtatatatgaaagattttttttatgcagtcatccactgataaacactgaggttgatttccatatctttgctattgtgaatagtactacaataaacaaatgagttcagttatatttttgatataatgatctcttttcctttcaggtagatacccagtagtgggatctcttgaactaccagtagtggtagttctttgagaaatcttcatgctgttttccatagtgttgtactaatttatat

SEQ ID NO: 2064 - protein, 258 aa, Homo sapiens
MYIHMCMCVDVYTYIICMCVDVYTYIICMCVDVYTYIICMCVDVYTYIICMCVDVYTYIICMCVDVYTYIICMCVDVYTYILCMCVDVYTYILCMCVDVYTYIICMCVDVYTYIICMCVDVYTYIICMCVDVYTYIICMCVDVYTHIRCMCVDVYTYIICMCVDVYTYIICMYIRILYACIYVYYMHVYTYIICMYIRILYACIIYVYTYICMYIRIYVYYMYVYMHIPILCIYVYTYIMYIRILCVYMKDFFYAVIH

SEQ ID NO: 2065 - DNA, 1081 bp, Homo sapiens
  source
  (1)..(1081)
  CDS (201)..(881)
acattgtattattttccaggaatgttcaagacatcacaaccccttctttacctgattcatttttcatcaacattctagacagagattaagcatcatctttccaagaagtctttctgtgttatttgtttacacatcagctgacatttttcttcctctggccatagtcatatatatatgtgtgtgtgtgtgtgtgtatatatatgtatatatatgtataccatatatatatgtatatatatgtataccatatatatatgtatatatatgtataccatatatatgtgtatatatgtataccatatatatgtgtatatatgtataccatatatatgtgtatatatgtataccatatatatgtgtatatatgtataccatatatatgtgtatatatgtataccatatatatgtgtatatatgtataccatatatatgtgtatatatgtataccatatatatgtgtatatatgtataccatatatatgtgtatatatgtataccatatatatgtgtatatatgtataccatatatatgtgtatatatgtataccatatatatgtgtatatatgtataccatatatatgtatatatgtataccatatatatgtatatatgtataccatatgtatgtatgtatatgtataccatatgtatgtatgtatatgcataccatatgtatgtatgtatatgcataccatatgtatgtatgtatatgtataccatatgtatgtatgtatatgtataccgtatgtatgtatatgtataccatatgtatgtatgtatatgtataccatatatatgtatgtatatgtataccatatatatggtatacatatatatacacacacatgcatacacacacatatatattaaatatatatgaatatatatgtttttcagcatctgtgtcattacattataataggttgtccgtacatctgtgtcccctattaatcagcaagcttcattaggaaagtgattggatcccctgatttctattccttatatctaatacactactggactacaatacagactttaaattgattggttgagtgagggaatggatgaatacccagcatt

SEQ ID NO: 2066 - protein, 226 aa, Homo sapiens
MYIYVYHIYMYIYVYHIYMYIYVYHIYVYICIPYICVYMYTIYMCIYVYHIYVYICIPYICVYMYTIYMCIYVYHIYVYICIPYICVYMYTIYMCIYVYHIYVYICIPYICVYMYTIYMCIYVYHIYVYMYTIYMYICIPYVCMYMYTICMYVYAYHMYVCICIPYVCMYMYTICMYVYVYRMYVYVYHMYVCICIPYICMYMYTIYMVYIYIHTHAYTHIYIKYI

SEQ ID NO: 2067 - DNA, 2330 bp, Homo sapiens
  source
  (1)..(2330)
  CDS (201)..(428)
  CDS (1141)..(1256)
  CDS (1282)..(1554)
  CDS (1794)..(2130)
cctcattagtgatgtcgtatagagcgtcctcattagcgatgtcatatacaatgtcctcattagcgatgtcatatacagcaacctcattcgctatgtcttgtaaagcatcctcattagcgatgtcatatacaacgtcctcattagcgatgtcgtatacagcgtcctcgttagtgatgtcttgtacggtgtccttataagcaatgtcgtctacagcgtcctcgttagcatgccttgtgggtgtcattagcgatgtcatatacagcatcctcattggtgatgtcttatatggtgtcattagcgatgttgtgtacagcgtcctcgttagcaatgccttgtacagtgtcctcgttagcaatgtcatatacagtgtcctcattagcgatggcttatacactgtcctcattagcgatgttgtgtacagcatccttgttagtgtgcctcgtacggtgtcattagcgatgtcgtatacagcgtcataattagcgatgtcttatacggtgtcatcattagtgatgttgtgtacagcgtcatcgttagcgatgccttgtatggtgtcctcattagcgatgtcgtatacagcgtgctcactagcgatgtctttttttttttatatatactttaagttttagggtacatgtgcacattgtgcaggttagttacatatgtatacatgtgccacgctggtgcgctgcacccactaactcatcatctagcattaggtatatctcccgatgctatccctcccccccccaccccacaagagtccccagagtgtgatattccccttcctgtgtccatgtgatctcattgttcaattcccacctatgagtgagaatatgcggtgtttggttttttgttcttgcgatagttactagcgatgtcttatacggtgtcctcattagcaatgtcgtgtacagcgtccacgttagcgtgccttgtcggtatcattagcaatgtcgtataaagcgccctcattggtgatgtcttgtacggtgccgtcattagcgatgttgtgtacagtgtccttgttagtgacggcttgtatggtgtcctcgttagcgatgtcgtatacagcgtcctcattaccgatgccttgtatggtgtcctcattagcgatgtcgtgtacagcgtcctcgttagcgtgccttgtacggtgtcattagcgatgtcatatacggcaccctcattagcgatgtcgtatacggagtcctcattagcgatgtcgtgtacagcgtccacgatagcgtgccttgtcggtatcattagcaatgtcgtataaagcgccctcattggtgatgtcttgtacggtgccatcattagcgatgttgtgtacagtgtccttgttagcgacggcttgtatggtgtcctcgttagcgatgtcgtatacagcgtcctcattaccgatgccttgtatggtgtcctcattagcgatgtcgtgtacagcgtcctcgttagcgtgccttgtacggtgtcattagcgatgtcatatacggcaccctcattagcgatgtcgtatacggagtcctcattagcaatgtcgtgtacagtgtccacgttagcgtgccttgtcggtgccattagcaatgtcgtataaagcgccctcattggtgatgtcttgtatggtgccgtcattagcgatgttgtgtacagtgtccttgttagcgacggcttgtagagtgtccttgttagcgatgtcatatacaacgtcctcattaccaatgccttgtatggtgtcctcattagcgatgtcgtgtacagcgtcctcgttagtgtgccttgtacggtgtcattagcgatgtcatatatggcatcctcattagcgatgtcgtatacggagtcctcattagcgatgccgtgcacggcatcctcgttagcaatgccgtgggcagcatcctcgttggcgatgccgtgggcggcgtcctccttggcgatgccctgggcggcgtcctcgttggcgatgccctgggcggcgacctcgttggcgatgccctgggcggcgtcctcgctggcgattccgtgggcggcgtcctcgttggcgatgccctgggcggcgtcctcgttggcgatgcccttgtcggcggcctcgttagcgatgccgtggacagcgtcctcgttagtgatatcgtgtgaggcatcctcgttagtgatgttgtgtacggtgtcctcatggggagctagaagaacacagagttaaggtcagtgccctggtagtggagactgtgaatcacccaggggcttgcttggtgtggtgcatggaggtggctgatcacagcatgggccaagctgatgctgggacatcctcccaggtggacctgcactagtgaagctaa

SEQ ID NO: 2068 - protein, 317 aa, Homo sapiens
MSSTASSLACLVGVISDVIYSILIGDVLYGVISDVVYSVLVSNALYSVLVSNVIYSVLISDGLYTVLISDVVYSILRALYGVISDVIYGTLISDVVYGVLISDVVYSVHDSVPCRALIGDVLYGAIISDVVYSVLVSDGLYGVLVSDVVYSVLITDALYGVLISDVVYSVLVSVPCTVSLAMSYTAPSLAMSYTESSLAMSCTVSTDVIYGILISDVVYGVLISDAVHGILVSNAVGSILVGDAVGGVLLGDALGGVLVGDALGGDLVGDALGGVLAGDSVGGVLVGDALGGVLVGDALVGGLVSDAVDSVLVSDIV

SEQ ID NO: 2069 - DNA, 35425 bp, Homo sapiens
  source
  (1)..(35425)
  CDS (201)..(293)
  CDS (21253)..(21367)
  CDS (21462)..(21603)
  CDS (23918)..(24055)
  CDS (26460)..(26597)
  CDS (26868)..(27016)
  CDS (35125)..(35225)
  modified_base (35270)..(35369): a, t, c, g, unknown or other
cggcttatgctcagggctgctgtcactgcacagccaggctgccctggtgcaactggggagcggcccagcaggtttttcctcccagtctgcctgccgcggggcaccgggctgtcctctccccgcctcatcagggcccagccttcccaagctcgccttctctctgccgggcgcagccggctggtggtggccactgagacaagatgcctagcatcttcgcctatcagagctccgaggtggactggtgtgagagcaacttccagtactcggagctggtggccgagttctacaacacggtgagtgcgtgggtgtgtgaaggagtctcgccagatgccggttcgaatcccggttcctccccatacagccttactggggaatcttgctggagtggttcacctgtctcagccctagttttctcatctgttagccaaagagtgccagctttcattcatttacttgtctttacttgatgccaagctctgtggtaggttttggagacacattggtggccaggaaaagaaccggtctctgccttccctaagctaactctgatgtgactgcaggcatttgcaaccgggagcgatggtgccttcttggagggcacagaggcagctgtggtagggggaggcagagggtgcccctgagctagagggggtgggccaatcaggaaaggcttcctggaagaggtgattgtgtctgtcttgtttgcagctgtacccactgaccaacttgtcccagtgtgcctgggactatcctggtttcagtatttaaaaagtttcacctcttggctgggcgcggtggctcacgtctgtaatcctagcactttggaaggccaaggtgggtggattgcctgagctcaggagttggagatcgccctgggcaacgtggtgaaagcccatctctactaaaataaaaaattagctgggtacggtgtcaggcatctgtagtccaagctactcaggaggctacggcatgagaatcgcttgaacccaggaggcggaggttgcagtgagctgagattgtgccactgcactccagcctgggtgaaaaagcgagactgtctcaaaaaaagaagaaaaaaagtcccacctcctgagaaactcctcagttctggacattctgaggtggtcttctctttccctgttaaaacaccacatgggaagtgctaaaaaatcatggatgtacctagcaccatggctcatgcctgtaaccccagcaatttggaacgcagaggcaggaagatcgcttgagcccaggagttccagaccagcctgggcaacatagcaagaccctgtctctacaaaaagtttttaaaaattagctgggtgtggtggtgtgtgcttgtagttccagctacttgggaggctgaggggggaggatttcttgaacccaagaagtggaggatgcagtgagctgaggtcataccactgcactccagcctgggtgacagagggagaccctgtctcaaaaaaaaaaaaaaaaaaaaaaggccgggcgcggaggctcacgcctgtaatcacagcactttgcgaggccaaggtgagtggatcacctgaggtcaggagttcgagaccagcctggccaacatggtgaaaccccatctctactaaaaatacaaaaattagccaggtttggtggcaggcacctgtaatcccagctgcttgggaggctgaggcaagagaatggcttgaacccaggaggcggaggtttcaatgagccgagatcgcaccattgcactccagcctgagggacaagagcgagacttcgtctcaaaaaaaaaaaaaaaaataggaatgcacaaatgatcacggcatttagccaaagcttaaagccaaagatcagtgcagctatgccatgcccatactgggtgctgggaacacagaggtgtttgcctggagccctgggaatgatgggatccaggcatagtgcttagttcttttgtttgtttgtttgtttgttttgaaacggagtctcgctttgtcacctaggctggaatgtaatggcgcgatctcggctcactgcaacctctgcctcccgcgttcaagccattctgctgcctcagcttcccgagtagttgggataacaggttcccaccaccacgcctggctaatttttgtatttttagtagagacagggtttcaccatgttggccaggctggtcttgaactcccgacctcaggtgatccgcccacctcagcctcccaaagtgctgggattacaggcgtgagccacggcgcccggcctcgtagtgcttagttctatgccctgcacataggccttgctcagtgagcagaagagtgcttgctggctgggtgctatggctcacgcctgtaatcccagcactttgggaggccgaggggggtggatcatgaggtcaagaggtcaagaccatcctggccaacgtggtgaaatgccgtctgtgctaaaaatacaaaaaattagccaggcatggtgccgggcgcctgtagtcccagctactcaggaggctaaggcaggagaatcacttgaacccgggaggcagaggttgcagtgagccaagattgtgtcactgcactccagcctggtgacagagcgagacctcatctcaaaaaaaaaaaaaaagtgcttgctgtgtaccaggcatgaccctaaacattttacgtgaaacacctcctttaatctgcacagtgacatggggagttagatgcaatctatatgatacagacttcatcccattttccaggtgataaaacaggtgttcaaggagtttgaaggctgtgcccagggtcaccctggttattagagccaggatttaaacttggtgagtccaggagacttttctgggaggagagtccgaggctcaggttgctctgaccctgttgcctttcaccccggggcttcccatacctgggaagtgggattatgagactccaggatcctcacggtctcactgattcttgctcttccttagccagagatatggttcccggtcctcagtagtcccacctctaacatgggagggagctgaatgattggtcctacgaggctgagatgatgggtaagggctctagagctcttctctctggaatccccagcagccactgtggtccagtgttctgttttcatcctgcacccagatgagagcccttgcagaaggcactgagaggctgggtatggtggctctcacctttaatcctagtactttggaaggtcgagacaggaggatcacttgaggccagaagttcaagaccagcctaagcaacatagcaagacccagtccctacacaaaatttaaaaactagctgtgggctgggcaccactggcttatgcctgtaatcccagcactttgggaggccgaggcaggtagatcatttgaggtcaggaatttgagaccagcctggacaacatggtgaaaccccatctctactaaaaatacaaaaattagctgggcatggtggcgcatgcctataatccctgctactggggaggctgaggcacgacaatcacttgaatctgggaggtggaggttgcagtgagccgagatcacgccattgcactccagcctgggtgacagagcaagactccatctcaaaagattaaaaattagccgggcgtggtggctcacgcctgtaatcccagcactttgggaggccgaggcgggcagatcacgaggtcaagaaatcgagaccatcctggctaacacggtgaaaccccgtctctgctaaaaatacaaaaaaattagctgggcgtggtggcgggcgcctgtggtcccagctactcgggaggctgaggcaggagaattatgtgaacccggtaggtggaacttgcagtgagctgagatcacgccactgcactccaacctgggtgacagagcaagactccatctcaaaaaaaaaaaaattaaaaattaaaaaattaaaaataaaataaaaataaaaactagctggtaggctaaggcaggaggattgcttgagttcaggagtttgaagctgcagtaacctgttactgcaccaccgtattccggcctgggcaacagagtaatatcctgtctctaaaaaataaaaagcacctagaaagggctgattcaagtgtgtcctgagcctgagtatagctgtgtgttcttatctcaggcaaaattgtcctccactggattctgctgtagcctgtccccagataaaataaattgagccacctgtagctaccgggtaaggctgcagttgtcaaactcctctgatcagaacacctattatgaaagaaattttacatcatcatcatcctgtacctgcctttccagatgtgtatcatacagaaacaaaagttgcacaaaacgagacttacccttccctggtacaaacacacctggatctattctattctattctattctattctattctattctattctattctattctatatcaaaaagcctctctccaaacaggtcaggggatgaggaatagaatcagagttatgtgagaaagggcttccccaagaccttctcctccaaaacgcttctgagtatcccaaacccatagctaataaatcatacagttcaaaagggtggagtgggtggcaaattttttcttttcgtgtttattttattttatttttattttacctgttttagagacacagtctcactctattgcccagcctgggatggagtggtgccatcatagctcactgcagccttgacctcctggacttaagtgatcctcctgccccagccttcaaagtagctggaaccacaagagcatgccaccaaacacagctaatttttaaatttttatacagatgggtgctgggcacagtggctcacacatgtaatcccagcactttggaaggccgaggtgggccaatcacttgcgctcaggagttcaagaccagcctggaaaacacgatgaaaccccatctctatcaaaattacaaaaaaaaaaaaattagccaggcatggtggcatgcatccgtagttccagctacttggaagactgaggcaggagaattgcttgaacctgggaggtggaggttgcagtgagtggagatggtgccactgcactccagcctgtgcgaaagagtgagactctgtctaaaaaaacattgttttgtatagagatggggtcttgctatgctgccaggctgggctcaagtaatccttgtgccttcacttcccaaagtgataggattacagacataagccactgcacccagggccaaccttttctgtacagggctagctagtaaatatttttgactttttttttttttttttttttttttgagatggagtctcagtctgttgcccaggctggagtgcactggtacaatctcgatcttggctcactgcaacctccacctccctggttcaagcaattttcctgtctcagcctcccaagtagctgggactacaggcacctgccaccactcccggctaatttttgtatttttagtagagatggggtttcaccttgttgctcaggctggtcttgaactcctgacctcaggtgatccaccctccttggcctcccaaagtactgggattacagccatgagccaccacgcctggccaatatttttggctttctgggccatccagactctgtctcaactacgcaactatgccactgtagctgaaaaccagccatagataatagataaataaatgggtgtggctgtatgccaataatttttttttttttttgagatggagtctcactctgtcgcccaggctggagtgcagtggtgcaatcttggctcaccacaacctctgcctcccaggttcaagcaattctcctgtctcaacctcccgagtagctgggattatagatgagcaccaccatgcccagctattttttgttatttttagtagagatggggtttcaccatgttggccaggctggtctcgaacccctgacctcgtgatccacccacctcggcctcccaaagtgctgggattacaggcacaagccaccgtgcctggccaattttttttttattgacactgaaatgtgcatttcatataattttcacatgtcacaaaataatcttttaatttttcaatcatttgaaaatgtaaacatgattcttagcttgtgggacacatgatacaaggcagtgggctgaactttgcccacaggccaaagagtgtttatttattttattttattttattttatttttattttattattatttatttatttatttattttgagacggagtctcgctctgccgcccaggctggagtgcagtggcctgatctcggctcactgcaagctccgcctcccgggttcacaccattctcctgcctcagcctcccgagtagctgggactacagacgcccgtcaccacccctggctaattttttgtatttttagtagagacggggtttcaccgtgttagccaggatggtctcgatctcctgactttgtgatccgcctgcctcagcctcccaaagtgctgggattataggtgtgcaccaccatccccagctaatttttgtattttttgcagagacagggtttcaccaggtcatccaggttgctctcaaactcctgacctcaggcgatctgcctgcctcaatctctaaaagtgctggcattataggcatgagccactgcacccagcctgctttcttgctgctctgtttgggagcatgcagagcccagcagctcatggtcagggttacagaaacaggaaacacccaagaactcaccccaggtgtttggagacttcatagaaaaggacatgtaggagttgggttttgaaagatgaataggagtttgccaagtggggaaggatagcaggagagcagggaaagatgtgctcagttctggaagtcaaagaagagctggtcagattgagaaaggagaaagtatgttcctgtagctacaatgtggggagagatgaagacgtaacggttcgcatgcttggttagaatgttggaaacgtatcctgtgttcactgatggactcattcatttattcaatcaaaatgctataaacccaccgctgctggatgatcctgggattccagggaggaggctcggtgtccccaggttgtaagagacccagaattagaaacagatttcttcagccccatggttagcttgaggcggagagaggaagggggtgccagaaacggggtgtcagaggaatggggcataaggtctctgcttgctgaatggggaaagaacatcaacaatgctctggggggcaagtgtggtggcttacacctgtaaccccagcactttaggaggccgaggcaggaggatcacttgagctcaggagtttcagaccagcctgggcaatatagcaagaccccatcactacaaaagattaaaaaaaaaataggccgggcgcagtggctcacgcctgtaatcccaacaccttgggaggccgaggccggcggatcacaaggtcaggagatcgagaccatcctggctaacacggtgaaaccccgtctctactaaaaatataaaaattagccgggcattgtggtgggcgcctgtggtcccagctactcgggaggctgaggcaggagagtggcgggtgaacccaggaggcggagcttgcagtgagccgagatggtgccactgcactccagcctgggctacagagcgagactccgtctttaaaaaaaaaaaaaaaaaaaaaatagctgagcatggtggtgcacacttgtggtcccagctactccggaggctgaggcagaagaatcgcttgagcccaggagttcaaggctgcagtgagctatgatcacaccacttcactccagcctgagggacaaaaccagaccctgcctcaaaataaaacaaaaacaaaaacaacaatgaaaaacaaacaataccatggaaaccaaatctaaaaagaatgagtagatgtcctctaaggctttgaattttgtttgtttgttttagtgacagggtcttgctctgttgccctgcctggagtacagcggtgtgatcatagctcactgcagccttgaactcctgggctccagcagtcctcccgtctcagcccccagagtagctgggattacaggcatgagccaccacgcccagctcaagggtttggaggcaaagggaatagcatatgtaaaggtctttgttgttgttcttgttttgaggcggagtctggctttgtcacccaggctgtagtgcagtggcacgatcttggctcactgcaacctctgcctcccaggttcaagtgattctcctgcctcagcctcccaagtagctgggattatagcacctgccaccatggctggctaattttttgtatttttaatagagacagggtttcactttgttggtcagcctggtcttgaactcctgacctcaagtgatccacccacctcagcctcccaaagtgctgggataacaggcgtgagccactgcacccggccaaggtcttgaggtggaacagcacagcctggcaggaaatagtgagcagcttgaagcggagcccagggggagtctccccagtcgatgggggagagactgaagggtgagagaaaggactggaaaggttttcaggggccaaattgggaatgtcaggctgaggactgtgtgctctgtcctgagagccctggggagccatggggtggcttttgaacagaggagagtcatgatgtggggtcagctggggcaaccggtggcatttggcagatgggcagagagagccaggaagggtcatccaacaggaacagaagtcagcagtgtgggaggggcggctcgagtagggaaggggaagaggtccaggtgtgggctccgtcagtttgctcctgcttgcattggcctggtggcctccaggtgcagccttcttctgggttgatgacaacttaggagagtttccttccttcctccttccttccttccttccttccttccttccttccttccttccttccttcctttctctctctctctttccttccttccttccttcctttccttctctccttctttctctttctttcttctctcttctctctctttctctttctttctttattttattttgttttgagatggagtttcgctcttgttgcccagactaaagtgcaacagtgcaatctctgcctcccgggttcaagaaattctcctgcctcagcctcccaagtagctggaattacaggcacgtgccaccacgcccggttaattttgtatttttttttttttagtagagatggggtttctccatgttggtcaggttggtcttgaactcccgacctcaggtgatctgcccgcctcggcctcccaaagtgctgggattacaggcatgagccacctcgcctggcagagagtttcaaatggtgcaggtggaagtttcaaggtcccccaggtcctggaggcagtgagttatgatcacttcactgcactccagcctgggcaacagagtgagaccctgtgtctaaaaaaaaattaaaaagaggccaagtgcggtggctcatgcctgtaatcccagcactgtgggaggccaaggcagggagatcacttgaggtcagcagttccagaccagcctggccaacatggtgaaaccccatctctacaaaaaatacaaaaatagccaggcgtggtggctcacacctataatcccagctacttaggagggtgaggcaggagaatcgcttgaagctgggaggtggagattgcagtgagctgagatcacaccactgcactccagcctgggtgacacagcgagacttggtctcaaaaaataaaaataaaaagagagaaatgaggagatcagagtcggaagggggtggaggggagatagtctgcagtgctgccatctccaacactctcctcacctcctctcctgagtctccttgaggctggcttctgcagtgggattccagtcccagctctcccctgaatgctgtgtgacccaggaggagacctgcccctctctgagctacacacaatggcaggtctcataagctctaaattacaagtatggatgtgagatccactcatgcctccctcttctgctgtccttcttatcaatatccacagcaaaaacaattaattactggacgcctctggtgtgccaggccctaccaaaagcaagatgggagggcaggaaaatacttctctgtattagttcattttcactctgctaataaagacttacctttatgtctgggcagtttgcaaaagaagaaaaagagactaggcaatttacaaaagaaagaagtttaatggacttacagttccacgtggctggggaggcctcacaatcatggtggaaggcaaggaggagcaagtcacatcttacgtggatggcagcaggcaaagagaaagagcttgtgcagggaaactcccatttttttttctttttttcttttttttttttgagacggagtctcgctgtcacccaggctggagtgcagtggcgtgatctctgctcactgcaggctctgccccctagggttcacaccattctcctgcctcagcctcccaagtagctgggactacaggcacccgccacctcgcccagctaattttttgtatttttagtagagatggggtttcactgtgttagccatgatggtctctatctcctgacttcgtgatctgcctgccttggcctcccaaagtgctgggattacaggtgtgaaccactgcgccctgcctgttttgttttttgtttgtttgttttgagacagagtttcactcttgttgcccaggctggagtgcaatggcgtgatctccgttcaccgaaacctctgcctccctggttcaagctattctcctccctcagcctcctgagtagctgggcttacaggtgtgcaccaccacacctggctaattttttgtattttcagtagagatggggtttctccatgttggtcaggctgttcttgaactcccgacctcaggtgatccacccaccttgttctcccaaagtgctgggattacaggcattagccaccacgcccggctgaaactcctgtttttaaaaccatgagatctcatgagactcattcgctattaggagaacagagcaggacagacccaccccgataattcaatcacacgggaattgtgggagttacaatttaagatgacatttgggtggggacacagccaaatcatatcattctccaaagaagaatcttttgctttcttgttgctctgtttgcaaggagctgagtctggggttgaggttgcagagcccagacactcatggttgtggctacaggagaagaaaacacccgaggagtcagcccaggtgttgggaggcttcatggaaaagggcacccagggttgggttttgaaagatgaataggagtttgccaagtggggtaggagtttggggaaagacagcagaagagaagaagaagatgtgctcgagtcctggaagtcaaataggagctgctacatatttctgctacatattttgtctttcatttacatctttagatcaaaagcatccttttaaatagctgcataatatttcactagaatgtattcagccccacgcacctgggtgacagtgttacagtttctattttatttattcattttttattgcaattacaaatgacttagggatgaatttgtatataaatcttgttgacccagggaaggcagatgccgtaagttggataattacatgcatgaaaccagtgatctagcccatgatactcccaggcaagataggttcctctggacctcctttctcctttgaagaaaacaggtgttggtgacccttccctgcaagcatcctggggctgatggaggggtttgagttgttgggacaacaatttcttctttattcaacaagaattgcaggagcaccaggctctgctccaggctctgaggacacagcagtgatccaagcaccaaaactccctgccggccgggtgcagtggctcatacctgtcatcccagtactttgggaggccgtggtgggcagatgacctgaggtcaggagttcgagaccagcctggccaacatggtgaaaccccgtctctactaaaaataattttaaaaattaaccagatgtggtggcacgtgtctgtagtcccagctacttgggaggctgaggcagaagaatcgcttgaacccagaaggcggaggttgcagtgagctgagattgcgcactgaaccccagcctgggcaacagagtgagactctgtctcaaacaaaacaaaacaaaacaaacaaagaaaaaaatacaagaaactccttgccctggtggggctgatgttctggggatggagaagaagaaaataagccaaagtcaaggctacaagatgccaggcggtgggatgtgccaaggaagaaaaactcatgcattcactctctttttttaaagaatgtatttcggccagatggggtggctcacacctgtaatcccagcactttgggaggctgagacaggtggatcagttgaggccaggagttcaagactagtcttgccaagatggcaaagccccatctctactaaaaatacaaataaataaatagacaagcatggtgatgggctcctgtaatcccagctactcaggtggctgaggcaggagaatcgcttgaacccaagaggcggaggttgcagtgagccaagatcatgccactgcactccagcctgggcgacagagtgagacttggtctcaaaaaaaaaaaaagaaagaaaattttctggaattagctagtgtgatggttgcatgccttatgaatatactgaaacccactgaattgcatagtttaaaagagtgaattttatagtatgtgatttatgtcttgattttaaaaatagggatgttaaaaaaaaaaaaacaacccacagctcttggcacatcctaagcactgaatacattgtagctattcttattacgagtgaatacagcacccagagatgtcaaagtgacattcattaattttattaggtatttattcatttcattgaataattagcaccaactgtaatcctcataaaatcctatgaagtaggtacaattatgctccccattttacagatggggaaatcaaggctcagagagggtatatttctttcctagggccacacagtatgcaaattacaattgcacaaaagttgcagcttcttaaagagcctggtcctagaatctctcccttaaccatggtgctgtgagaccacttaattactggtgattaggaattaattgtgtgcattttggatggcacagcggctcacacctgtaatcccagcactttgggaggctgaggcaggcggataacctgaggtcaggagtttcagaccagcatggccaatatagcgaaaccccgtctctactaaaaatacaaaaattagccaggtgtggtggcacacacctgtagtcccagctactcaggaggctgaggcaggagaattgcttgaacctgggaggcagaggttgcagtgagccgagatcgcgccgctacactccagcctgggtgacagagtgagatatacgcattttaattcatgcaattaagtcttgtgctgtggccggtgcacacttcgtccctccaacattagcaggcacacttggaatgaatgcaggtggctgtcctcaactggagacagaggccaggtgttgctggtgggagggagtttgagctttggcaatgaggacgaagaatgaggagatgttggagatgtattcaacaaacttttctttctttccttttttttttttttttttgagacagaatctctctctgtcacaggggttggagtgcaatggtgcgatctcagctcactgcagcctccacgttcaagcgattctcctgtttcagcctcctgagtagctggcactacaggcatccaccaccacaccggctaattttgtatttttagtaaagacagggtttctccatgtcggccaggctggtcttgaactcctgacctcaagtgatctgcccacctcagccttccaaagtgctgggattacagacatgagccactgcgcctggccccttctgtattatttatgtgtattcttttctactaaaatgtattaggcgcctactgtgtgccagagagtgttctagatacagggtggggagggggcaaaacacacagagctccctggtcccgtggcacttaactctgtaatcctcacagcagcctctggaagtaggagcaggaaaaccaggcacaggaggtcccctgctgtcctgactgtatacaccccgagaaggcagggactttgttttcagacactggtatggtccttgagcacatagtaggtactcaagggatgcttggacaaatgaatgaatgaatgaatgaacgaatgaatgaaggaagggagggaggtgatgtcacctgctggagctgggaccaagaaggtccagctcacttgtgtccagagttcaggactgggctggctttggatgggatcccagacaggtgtctcccccgcctggcagagcctgggtgggatgagaagcagggaacgtgggggctgagccccggaaggcagggagggagaccctggcatccaggcagtttccgatgttatcggaaactccattagtcggggtcccccattagtcagtatctccacccacagtctctgtcctccttctgagcgcttagggacactgttgataactcctggctggactctgctggcccctaagcttggaataacgatacccataacaggcctgttattattattatctccttcaacaataacaacagcagcagccccagctattttttgagctcataccacatcctgggcaatgcacttctgcaatgcctcatcttgtgcatggcccgcatcagcctgcaaggtaccattgatgatgtgtcctgcttttactgatacaagcgaagagaaaccaagaggcattagtcacagggccaggcagcaggggagcaccctcttaatcaccaccacccgtctagtctttccatctttgttttcttttttttttctttttctttttgagttggagagagatgagttaggaataattttatttttatttatttatttattttttttgaaacggagtcttgctctgttgcgcaggctggagtgcagtggcacgatctcagctcactgcaacctccgcctcccgggttcacgccattcttctgcctcagcctcccaagtagctgggactacaggcgcctgccaccacacccagctattttttttttttttttgtatttttagtagagacggtgtttcactgtgttagccaggatggtctcgatctcgtgacctcatgatccgcctgcctgagctttccaaagtgctggaattacaggcatgagccactgtgcctggcctattttttattttttatttattttggggggacagagtctcactatgtcacccaggctggaatgcaatcgtgtgatctcagctcactgcaacctctgcctcccaggttcaagcgattctcctacctcagcctcctgagtagctgggattacaggcatgcgccaccgcacctggctaattttgtatttttagtagagatggggtttctccatgttggccaggctggtctcgaactcccgacttcaggtgatcggcccacctcggcctcccaaagtgctgggattacaggcgtgagctgtaatccatgcccggctaattttttgtactttttttttgttttttttaggacggggtttcaccgtgttagccaggatggtctcgatctcctgacctcatgatctgcccgcctcaccctcacaaagtgctgggattacaggtgtgagccaccgcgcccagcctgaacatgttttaaatggagatttttagaggctgaggtgagtggatctgctttgttcaggagttcgagaccagcctgggcaatatgatgaaaccctgcctctactaaaaatacaaaaattagacatacatggtggtgagtgcctgtaatccctgctactcgggaggctgaggcaggagaattgcttgaacccgggcggtggaggttgcagtgagccaagattgccccactggattccagcctgggtgatagagcaagactctgtctcaaaaagaaaaaaaacacaaaaacaaaactaacaaacaaaaaacaaaacaacaacaaaaaaagttggagagagatgagttatggaaggaatttatacgccaagtttaagagtttagactttatttattgaaggcccagacacgttttaatggatgcttttgaatctgggagactggttgggtcagtatcttcaggcacgcgttgatattcaagggctggtgtttggttggaggcagagggaacattgtgtttgtttgggagtatgtgtgcatcagcacaaatggaggcaactgaactagggccacgggctgagaagaggcgcatggaggcgttggcatggcccctgtcccatctgtccttggaccactgaagagaagcgcttgcagtccagaactgtagtcgtaatctgtttactgacattgtccatttcatatcaatcacttgtttttctttccacacctgtcttagttcagtttgtgttgctataaaggaataactggggctgggtgcagtggctcacgcctgtaatcccagcactttgggaggccaaggtgggtagatcacttgaggtcaggagtttgaaaacagcctggccaacatggtgaaaccccgtctctactaaaaatacaaaagttagccgggtatggtggcacgcgcctgtagtcccagctacttgggaggctgaggcaggagaatcgcttgaacccaggatgcggaggttgcagtgaaccgagattgcaccactgcactccagcctgggtgacagagtgagactccatctcagaaaaaaaaaaaaaaaaaaaaagatggggagggaaagagacttgtttctgagctcatgtgacagtttcatgtttttcttttgtttgtataaattgaagaagtacaagtgcagttttgttacatgtatgtattgtgtggtggtgaagtctgacctcttttttttttttttttgagagggagtctcgctctgtcgcccagactggtgtgcagtggtgcgatctcggctcattgcaacctctgcctcctggattcaagcgattgtcctgtctcagcctctggagtagctgggattataggcatgcaccaccatgctcggctaattttttgtatctttagtagaggcaaggtttcaccatgttggccaggctggtctcgaactcttggtctcatgatccactcacctccacctcccaaagtgctgggattacaggtgcaagccaccgcgcccggcccgatatttgattttctgtttctgagttgtttcacttaagatcatgtcctccggttccatccatgttgccgcaaaggcatttcattctttgtgtgtgtgtgtgagacagggtttcactctgtcacccaggttggagtgaagtggcacaatcacagctcctgcagcctccaactcctgtgctcaagcaatctttcctcctcagcctctcaagtagttaagactacaggcacatgccagtatgtttggctaattttctaaatttattttttatggaggtggggtctcactatgttgcccaggctggttgcgaactcttgtcctcaggcaattctcctgcctcagcctcccaaattgctggaatcacaggcatgaaccatcacacctggcctatttcattcttttttctttttttgagacggagtctcgttctctcacccaggctggagtgcagtgcaacaatctcagctcactgcaacctctgtctcccagattcaagtgattctcctgcctcagcctcccgagtagctggactcacaggcacacaccaccatgcctggctaattcttgtattttttgtagagatggggtttcaccatgttggccaggctggtctcgaattcctgacttcgtgatttgcctgtctcaacctccccaagtgctgagattacaggtgtgagtcaccacacctgggctcattctttttttaatggctaaatagtattccaggccaggtgtggtggctcatgcctgtaatcccagcagtttgggaggccaaggcgggtggattgcttgagtcctggagttagagaccagcctgggccacatggccaaatcccatctgtacaaaaaatacaaaaattaggctggccgtggtggctcaagcctgtaatcccagcactttgggaagccgaggagggtggatcacaggatcaggagatcgagaccatcctgactaacacggtgaaactccgcctctactaaaaatacaaaaaattagccaggtgtggcggcgtgcacctgtagtcccagctgctggggaggctgagtcaggagaatggcatgaacccgggaggcggagcttgcagtgagccgagatcgcgccactgtactccagcctgggcgacggagtgagactctgtctcaaaaaacaaaacaaaacaaaacaaaaattagctggacatggtggtgcatgcttgtagtcccagctacttggagggctgaggtgggaggattacttgaacctgggatgtcgaagctgcagtgacccatgatcgtgtcactgcattccagcctcggcaacagagagagaccctgtctcaataaataaataaataaataaataaatataaataaataaggccgggtgcagtggctcacacctgtaatcccagcactttgggaggccgaggcgggcggatcatggggtcaggagattgagaccacggtgaaaccccgtctctactaaaactacaaaaaaataattagctgggcgtggtggcaggcacctgcagtcccagctactcaggaggctgaggcaggagaatggtgtgaacccaggaggcggagcttgcagtgagctgagatcgcgccactgcactccagcctgggcgacagagcaatactccatctcaaaaataaataaataaataaataaataaataaataaaattccattgtgtatatataccacatcttctttatccaatcattgggttgatttcatatcttcacctgtgtgaacagtgctgcaataaacatatgaacgcaggtatattttagtataatgatttcgtttcctttgggtagatactcagtagcgggattgctggatcaaatggtagtcctaattttagttctttgaaaattctgcatactgttttccgtagaggttgtacccatttacatttccacccatattatataagtatttgtcatatgagagacttgtcgcggctcagacatatcagggagacactttgtggggagtcaaagtctgatgtcagcacgtcggggtcttgagtcatttaattttgggtgcaaatgttcttgtgaccttttttttttttttttgaggtgaagtcttagtctgttgcccaggctggagtgcgatggcgtgatctcggctcactaccacctctgcctcctgagtttaagcaattctcccacctcagcctcccaagtagctgggattacaggcacccaccactacacccagctatttttttgtattttagtagagatgggatttcaccatgttgccctggctggtttcaaactcctgacctcaagtgatctgcctgcctcagcctcccaaagtgctaggattacaggtgtgatccactgcacctggccaatttttgtattgttttacattattgtgaaatatatattcacatattatatatatatatatattcacaatatatatttacatactgttttgtagagtttcactatgttttttgggctggccttgaacgcctgacctcaggtgatctacctgcctcagcctcccaaagtgctgggattacaggcgtgagccaccatgcccggccatcacctgaagtttcattcactcatgtgtctgatgactgtatagggaagaattgaaccactggccctcctctggcatctctctccatctcagtgtggtctctacacatggtttctccagcgtggtggcttcaagggtagccagtcttcttgtgtggtggcctaggatctggacgtcttgtcctatgagatagagaaaggtggaagccacagttccttttatgacctaacctcagaagtcacacagtatcatttctgcttcatgctgtttgtcaaaaaggtactgcatcgtctttccttgtctgcaagggcaaggtcaactcatgacatccatggccacatttcagcccacaggaagaggaaagggggcaagctttccttacgtggtttttgaaaggactgacctggaagtagtagatgtcatttacattcttatctcattggccagagcaggtcaaaaggccacaaggccacagtgaactgcagcgaaggctgggaaatgtagtctttcactgggtaagctgtgtgcccagttcaaacttgggagatactatttttacaggaaaaggggctgggtgcagtggttcatacctgtaatttcaacactttaggctatggtgggaggatcacttgaggctgggagcttgcaaccagcctgggtgacatagtgagaccccttctctacaaaaaataaaagaaaattagccaggtggggtggcgggcacctgtagtcccagctactcgggaggctgaggcaggaggatcctctgagctcagctgattgaggctgcaatgagccatgatcccaccactgcactccagcctggcagcagacagcaagatcctgactgtaaaataaataaatagaaaaagtaaaagagaaggagaatatatatggaagtttagtggatagtctttgccacactcactgaatgaatgaatgaaccaataacggatcgagaaattgatctatggatgaccagctgatggtcaagatcagctgaaaagtggctaggtgcggtggctcacacctgtaatcccaccactttggggaggccaagatgggcggatcacctgaggtcaggagttcaagagcagcctggccaacatggtgaaaccctgtctctaccaaaaatataaaaaattagctgggcgtggtggcacgtgcctttaatcccagctactcgggagtctgagacaggagaatcgctcgaacctgggaggtggaggttgcagtgagctgagatggcaccactgcgctccagcctgagtgacagagcaagactccaagactccatctaaaaaaaaaaaaaaaaaaagggtcggctgaaaggttgacaggtgagtgattgacaaatcctgggttgatgcattgcctgaaatgcagcaggtaaccgactggctggtgactgagtgtctggacagagggcagcctcctccgtctcccctatctgacgagctcctccctatggctctctctgctccagttctccaatatccccttcttcatcttcgggccactgatgatgctcctgatgcacccgtatgcccagaagcgctcccgctacatttacgttgtctgggtcctcttcatgatcataggtagggaggtgtggttcaggtctgtgacagtcgggaggcagtgggggtttaggaggtggcggaccccactgaccgcctgcccttgccgctgcaggcctgttctccatgtatttccacatgacgctcagcttcctgggccagctgctggacgagatcgccatcctgtggctcctgggcagtggctatagcatatggatgccccgctgctatttcccctccttccttggggggaacaggtgggtcaggggctggccatctggacagggtggggtctgagtcttcagttgactctacatgagctcacctgagtcccctgggtccccacccttgaccctctttggggcccttggaattcctcccctgaccacttcgggttttctcctgaccctgcctgactcacttgggcttctggagacccctcccctgagcttacctggtttcttggaatccctcccttgatcctactttgataacctgggacttcctccagaatctgttgcagccaacaggagttccaggacctcatgtctacacttacctgggcctgagggactcctccccgagcctctcacctggcgttcctggcatctttcatctgatctgcttagaccccctgggtccctctcttgatctaattgatccccactcccacccttgacccctgtgaaataatctccttctccttctacttttccacctcctcctccttctcctcctccttctcctcctccttctccttcttcttcttcttctcctcctcctccttctccttctccttcttcttctccgcctcctccttcttctttttcttcctcctcctcctcctccttcttcttcctttttgagacagagtctcgctctgtcacccacactggagtgcagtggtgcgatctcggctcactgcagcctctgccttcagggttcaagtgatcctcctgcctcagcctcccgagtagctgggattacaggcacctgccaccacacccggctaatttttgtatttttagtagagacggtttcaccatgttggccaggctggtctcgatctcctgatctcaagtgatccacctgccttggcctcccaaagtgctgggattacaggcaagtgaaattctcttctaacccggcttaacccacctgagccctccaggacccccccagcccaccctattgacctctgggacccctgtcatctttcctttatccctactgggtcctggagagccactgtctgacatctcttaaattcacccggacccagggatccctcttctcagcccagctgggatcccctgaactccttgcctgacctcacctgggccctggaaaccatcacgctctcccaggctccctgggaccctcttctcatcctactgagtcctccctgggatccccctttagacgctgcctgggctcacctgggctccctgagactttctgctgagtccacttgggagcctcaggaccttcttcttctccttctccttcttctttttttttttttttttagatgaagtctcgctgtgtcccccaggctggagtgcagtggcgcaatcttagcttgctgcaacctccaattcccaggctcaagcgatccctgcctcagcctctttagtagctgagattacaggcacatgccaccacatccagctagttttttgtatttttggtagagacagggttttgccatgttgcccaggctggtctcgaactcctgagctcaagcaatcctcccacctcagcctcccaaattgctgggattacagtcacgagccaccgtgccgggctaggaccctttttcttgttgtcgtttttgagacagaatctccctctgtcacccaggctggagtgccgtggcgtgatcttggcccactgaaacctctgcctcctggttcaagcaattctcgtgcctcagcctcctgagtagctgggattacaggcatctgctaccacacctggctaaattttgtatttttagcagaaatgggatttcaccagggccaggcgcagtgactcatgccggtaatcctagcactttgggaggccgaggcgggcggatcacgaggtcaggagattgagaccatcctggctaacatggtgaaaccccgtctctagtaaaaatataaaaaatgagccgggcgtggtggcgggcgcctgtagtcccagctacttgggaggctgaggcaggagaatggcgtgaacctgggaggtggagcttgcagcgagcccagatcgcactgctgcactccagcctgggcgacagagcgagactccgtctcaaaaaaaaaagaaatggggtttcaccatgttgaccaggctggtctcaaactcctgacctcaggtgatccgcccacctcagcctcccaaggtgctgggattacagacatgagccaccgtgccctgcctggctaggacccttttctgagcctatctgggctccccagaatcctgtccttttctcacccacctgggccacgggatctccaagtgaccatgcctacaatcccaggacctcccttcccgcctacagctgagccccttcctccccaggtcccagttcatccgcctggtcttcatcaccactgtggtcagcacccttctgtccttcctgcggcccacggtcaacgcctacgccctcaacagcattgccctgcacattctctacatcgtgtgccaggagtacaggaagtgagtgaaggctgcaggtgcctgggcaggaggctcccatccccctcctagcacccctgactccaggctcgcggaggggacgtcccttctccaagatcacccactaacaagtagcagggccaggatttgaacctgactgactgcagagtttgtccttattattattttttttcttgagacggatcctcgctctgttgcccaggctggagtgcaggggcgtgatcttggctcactgcaacctccacctcccaggctcaagcaatcctcccactccagcctcccaagtagctgggactagaggcgtatgccatcatgccaggataatttttgtatttttctttgtagaaacagggtttcgtcatgttgcccaatctggtcttgaactcctgggctcaagcgatccacccacctcagcctcccaaagtgctgggattacaggtgtgagccactgcatccaccctacattatctttattttatttatttatttatttatttttgagacagagtctctctctgtcttccaggctggagtgcagtggtgtaatctcagctcactgcaaactctgcctcccgggttcaaggattctcctgcctcagcctcccgagcagctgggagtacaggtgtatgccaccatgctcggctaatttttgtatttttagtagagacggagtttcgtcatgttggccaggctggtctcaaactcctgacctcaggtgatctgcccacctcggcctcccaaagtgttgagattacaggcgtgagccactgtgcccagcagagtttgtcctttttatgatgaaacccagaaacagacatgcaagcagagaaaatagccccacaaacctccccacgcccactaaccagccacaacaaccacccacattttgtcaatctgttacatatttctcccagatttcatacaatttcacccctaatttttttttataatttaactcccctgattacaaaaaatatattattcttgctgggcatgatggctcatgcctgtaatcccagcactttgagagcttgaggcacacatacctctaccccaaaacatacaagcaccaaagggcttgttggttaagaataaatactatgcagtcagaaaaacttggtttagatcccagctctgccacttaccagctgtgtaaccatggggtggggtggggcatagtgcaatccctgtgcctcagtttactcctctacaaagtccttgtgaggactgagttaatatcttttttttttttttttttgagacggagtctcactcttgtcgcccaggctggagtgcaatggtgcgatcccggctcactgcaatctccacctcctgggttcaagcgactcttgtgccttagcctcctgagtagctgaaattacagacacacgccaccacgcccggctaatttttgtatttttagtagagacagagtttcgccatgttggccaggctggtctcgaactcctaacctcagatgatctgcccgcctcggcctcccaaagtgctgggattacaggcttgagccgccgcgcccagctgactgagttaatattcgaaggtgtttaatttattattgttacttgtttttatttatttatttatttatttaagatggagtctcactctgtcacccaggctggcgtgcagtggcgcaatcccggctcattgcaacctccgcctcttgggttcaagtggctcagcctcccaagtagctgggattacaggcggccaccaccatggccggctaattttttttttgtatttttagtagagtcagagtttcaccatgttggccaagctggtctcaaacttctggcctgaagtgattcacctgcctcagcctcccagacttctgggattacaggtgtgagccatcacgcccggcctattattgttttttaagacagggtcttactctgtcacccaggccggagtgcagcggcgcaatcacggctcactgcagccttgcactcctgggctcaaatgatcctcttgcctcagcctcccgagtaaccggaactgcaggcatgcaccatcatgcctggctaattttaacttttttttttttttttagagatggggtcttgctattttgcccaggctggtcttaaactccagggctcaagcgatcctcccaacctcagcctcccaaagtgctgggattacaggcatgagctactatgcctggcttgaaggacatttggaactgcacctgttgtgctggaaatgctgtgttagttctaagcacgagattgggccccctctgcttgcaccctcaattcctgctctttcccttctcccaacctctgagcctcatcactgtggaaggaggaatttcccatcagccccatcaggtgctgctctccgagccagcccctggtccccctctcccctctctaggaccagcaataaggagcttcggcacctgattgaggtctccgtggttttatgggctgttgctctgaccagctggatcagtgaccgtctgctttgcagcttctggcagaggattcatttcttctatctgcacagcatctggtaagcacatgctctgaggctgtggggggcccagagtcagagaatcttagatgccaaagctcggagtaggcacctgggggctggggttggagaagcagagagaggagagccagacactgggacctggcggtaggggaaggctgcagtcacggggccagacccagaaggctcccctggatggatggtcaagagtcatgagaagtaaaaagagggccggcgtgaggctgtgggtatcttgtgccctcgccaccttcgccctgcactccacaggcatgtgctcatcagcatcaccttcccttatggcatggtcaccatggccttggtggatgccaactatgagatgccaggtgaaaccctcaaagtccgctactggcctcgggacagttggcccgtggggctgccctacgtggaaatccggggtgatgacaaggactgctgagacctgccagcctcttgactatccaaccacccaacaacttgcctgtgtcttgagaagatagccccggtcaggacttgcacctgcgggacactcgtggttccttcctctgtttccccttccgtgtcctccttgtcctgcgctgccctgccttgaggcagatgatggactttgtgacatctctgagcagcagcctggtgactgtggggggctgtctcgtgcatctcccctccatgaccccccccatcctctttcatttcctcctctgtgtccacagcctcccagtgaccattgtcacatgagctggtgggactgtgtcaccaggtactggggtgactgaaggatgtggcatctaaatattagcttctaggctgggaacggtggctcacgcctataatcccagcactttgggaggccgaggtgggtggatcacctgaggtcagaagttcaagactagcctggccaacatggcaaaaccccgcctctactaaaaatacaaaaattagccgggcgtggtggtgcatgcctgtaatctcagctacttgggaggctgaggcaggagaatcgcttgaacccaggaggcagaggttgcagtgagctgagatcatgccattgcactccagcctgggcaacaagagagagactccatctcaaaaaataataaataaataaataaatattagcttctaaatattggtggtcactaccagactccctcatctgtctctggccatggcaatgtccctggctcttgggggacaccccagagaatgaacatgacttccaggcacctcattctacatccacatgtgcatgtggagatgttacatgaagacccactcacctcctcccatggacttgtgaggtcctcaggttcacagctgagaacagcagagtcccagactgggcagtctgggtgctttgggggcatgtggacatgagagaggagcgagggtagccaggatagtctctaaagcagtggtggagtggtggggaaggtctgttttcatggtggttaagagcacggggcctggagtcaggcagacctaagttagaattcctgctccaccattttctagttgtacaatcttggggaagtgatttttcctgcctcagaagctcaaggacattgtctgtaaaacagaaataatattccttgtcttgtgggggtttttgtgtggttaaaacaaatgaatgtgtgtgaagtccttagcatagagtttgacaaacatccagccacccactcatcctttaattcatctgccccataatttattcatccattcattcattcatctaccattaatttattcattcatccacccaccctttaattcatctacccattaatttattcctctatccattcatcatccacccatcctttgattcatccatccattaatttatccatctaaccatccacctacccatcctttaatttatctacccattagtttatccatctacctatcttttaattcatccacacattaatttctccatccttccatccacccgttaattcacccatccaatactttatccattcatccagccaccactaatttatccatccatccatccattcatctattgaactctccattgaactatcatctattcatcctttaatttgcccatccagtaatttatccaacgattccgcctttcttctattatctatcctttaatccacctattcattcattaatgtatctatccatccattgaatcatccatcaaactatccattcatctatccatccattatcaattattcatcatcatccatcatttattatcctttcattcatccacctattaagccatttatccattaatttacccaattatttatccatcaccttaccctacatccatccatccatccatccattcgcccacatttagccattcgtttgtccattcatttatccatccaaatcattcaaccatcctttcattcatctacttttcaactactcattcattcacccattcaacacacatacatatattgggctcctgctatatatcagatgctagcctctggggatccaagacaacaaagacatacaacgtccttgccctaatgaaggatatagatattaaacaaataaaaacacacacacacaaagcacttccagccattgataggcgctaaaaaagataaaatacaataatattctggaagatgatggttctgggagcagcactatcacatgggtggtccagggagtgcactttgcagttgagcccttaatgacaagagggaaccaacgataccaaaagccagggcaagtccattctggacagagggaatggctgtgtgaaacccctgggatgggaatgagctttcaagctggagcaacagcaaagacttttggccaggctcagtgtctcatgcctgtaatcccaacattttgggaggctgaggtgggaggattgcttgagcccaggagttcaagaccagcatgagcaacacagcaaaacctcctctctatgaaaaatttaaaaaaaattagctgggtgtggtggcatgagcctgtagtcccagctacttgggaggctgaggtggaggatggcttgagtccagaaagtggaggttgtgccactgcattccagcctagacacatagtaagaggttcttatctggggtccctggatgggtttcagcgtccacagaccacttgacattgtgtgcaaaagatgggtgtttgggcatacaatctaggtgcctggagtgcatcactttagataaatgagaatactctcattttatagatgtggctcagagagggcaagtgacttgcctaaggccacacatcgtggacttgaacccagtccgtccttttccaaagctctttgcgctacagtgagacagtagtgggactgaacttggattcctggtcatctgcttccgagtccttcttcctttcttgttctagaagccagaggtttttcacttgtggctccaggatggatcatggtggtaggaagaggtggggttgaggatgtctgtaaacttgtaaaatcatctgcaaaatgttgtgtgtcttggtgtatttgggggagaggagctgtgattccgtgacagcccctgaagaggtgtttgaccacccaaagagttgagaacctcagttaaaaatcttcttggggagggtggctgagcacagtggctcacgcctgtaatcccagcaccttgggaggctgaggtgggcagatcgcgaggtcagcagatggagaccatcctggctaacgtggtgaaaccccatctctactaaaaatataaaaaatgaggcaggcatggtggccggcgcctgtagttccagctactcaggaggctgaggcaggggaatggcgtgaacctgggaggcagagcttgcagtgagccgagatcaccccactgcactccagcctgggcgatacagcgagactgcgtctcaaaaaaaaaaaaaaattagccaggcttggtggcacgtgcctgtagtcccagctactcgggaggctgaggcaggagaactgcttgaacccgggagacagaggttgcagtgagccaagattgcgccactgcactccagcctgggcaacagagcaagactctgtctcaaaaaaaaaaaaaaaaaagaatcaacaaacaaaatcttctgagggaggaggatagagaagcgcctgcctcctcccctgaccccgtggctcttcctcttctttgccagcttatgtggcccgagtgcaaaatcatttaaaaaaaaatcccgctctatccccagtatctgtcctctggctcctgctggcccctcctcacagcctcctcttggggcatgaacgtagccgatgagcaagaggcctgggtaacctctgcctcccggttcaagcgagtcttgtgcctcagcctcctgagtagctgggattacaggcacgtgccaccacgcctggctaatttttgtattttcagtagagacggggtttcaccatattggccagggtggtctcgaactcctgacctcatgatctgcccacctcggcctcccaatccagtctgtaactctttttttttttttttttttgagacgcaatctcactttgtagcccaggctggagtgcagtggcgcgatctcggttcactgcaagctccacctcccgggttcacgctattctcctgcctcagcctcctatgtagctgggactacaggcgcccgccaccacgcccgactaattttttgtatttttagtagagacaggtttcaccgtgttagccagatggtctcgatctactgacctagtgatccacctgcctcggcctcccaaagtgctgggattacaggcgtgagccaccgtgcccagcctccagtctataattctaacaagctacatgacccttgcacatcctagtctccatcagggaaggtctcttggtgacaaaggacaaaatattcaaccccaactgcctgaaatcacaaatggacaatcagcatatatgctttttttttttttgagacaggatctctgttgcctagactggagtgcagtggtgcgatcttggctcactgcaacctccacctcctgggttcaagcaattctcatgcctcagcccccgaagcagctgggatgacaggcacccaccaccatacccgggtaatttttgtatttttaatagagacagggttttaccatgttggccaggctggttttgaactcctgacctcaggtgatccgcttaatcaggaaggtctgttggtgaaaaaggacaaaatattcaaccccaactgactgaaatcacaaacggacaatcagcaatatgtacttttgtttgtttatttgagacagagtcttgctctgtcacccaggctggagtgcagtggcacaatctcggctcactgcaacctctaccttctgggttcaaacaattcttctgcctcagcctcctaagtagctgggactgcaggtgcatgcaagcatgccagctaatttttgtatttttagtagaggtggggtttaaccatgttgcccaggctgatctggaactcctgagctcaggtgatctgcccacctcagcctcccaaagtgctgggattataggcgtgagccactgtgcctggccagcatatctacttttgaagttcagccccaggctgcagacctggctgggtccaggcttcaaatgatgtcaccagggccaggctctcttcgtccctctggctggcttcatgggtgggagcggccaccaggagggctaggctgccttctttccaagtttaaaagtgaactcaaaagctccaagcacaggctgggcttggtggctcatgcctgtaatcccagtgttttgggagaccgaggtgagaggattttttgagaccagcctgggcaacatagcgagaacctgtctctacaaacaaattaagaattagccaagcatggtggtgtacacctgtggtcttagctacttgggaggctgaggcaggaggatcgcttcatgagccagggaggttgaggctgcagtgagccatgatcacaccactgcactccagcctgagtgacagagtgagaccctgtctgaaaaaaaaaaaaaaaaaaaagaaaaagaaaaaagggctggagcagtggctcacgcttgtaatcctagcactttgaaaggccaaggtgagtagattgcctgagataaggagttcgagaccagcctgggcaacatagtgaaaccccatctctactaaaatacaaaaaattagctgggcatggtgtcacacacttgtgattccagctactcgggagactagggcagaagaatcgcttgaacccaattggcggaggttgcagtaagctgagattgtaccactgcactccaaactggacgacagagtgaaactgtctcaaaaaaaaaaaatgctgggtgcagtggcttatgcctataatcccagcactttgggaggacaaagcgggcagaccacctgaggtcaagagttcgaggccagtctggccaacatggtgaaaccctgtctccactaaaaatacaaaaaattagccgggtgtgatggcacacacttgtaatcccagctattcaggaggctgaggcaggagaatcacttgaacccaggaggcagaggttgcagtgagctgagatcacgccactgcattccagcctgggtgacaagagcaaaactctgtcaaaataataataataataatagcagctccaggcacacatgaagatgctcaatatcattgttgttagggaaatgaaaatcactggtcaggcacagtggctcacaactgtattcaccacactttgggaggtcaaggttggcggatcacctgaggttaggagtgcaaaaccagcctggccaacatggtgaaaccccatctctactaagaatacaaagtttagccgggcatggtggtgggcacctgtaatcccagctactcgggaggctgaggcaggagaatcgcttgaacccaggaggcggaggttgcagtgagccgagatcacaccactgcactccagactgggcgacagagccagactccatctcaaaaaaatatatacttatgtatgtgtattgcaacaggtggctgtgtgtgtacttttgtggcaggcagcaaactgggagcttacaggaaacaggttggaggccaaaaggaattccaaaaagtacccaaaagagggctggaccgtctactaggcgaaataaaaagggaacactcaacgttgttcccggggtgcaaataaagtgaaccactagagggcggtagagacttaacgtattaacagtaacagttccgttatggaccaaaagcaagaccagaacatccaaaatgttactttctttggagttcaagaccagcctgggcaacatagggagaccctatctctacaaaaaaaattttaaaaattagctggatgtggtggcacatgcctgtggtcccagctactggggaggctgaggtgggaggattgcttgagcccgggaggttgaggctgcagtgagctatgattgcgccattgcactctagcctgggtgactagatttaaaaatctaggctgggcgtggtggctcacgcctgtaatcccagcactttgggaggccgaggcgggaggatcacgaggtcaggagatcaagaccattctggctaacacggtgaaaccccatctctactaaaaatacaaaaaattagctgggcgtagtggcgggcgcctgtagttccagctactcgggaagctgaggcaagacaatggcgtgaacctgggaggtggagcttgcagtgagccgagatcgcgccactgcactccagcctgggtgacagagcgagactccgtctcaaaaaaaaaaaaaaatctaaaaagttgaagggctacaagtacagtttgtcacatgcatatattgcataatggtggtcttggcttttcgtgtatccatcacctgaataatatactttgtatctgttatacaatttttcatcactttctctccttccatccaccccccccgcccacccaatgtctatcattctacactctacacccatgtgtacacattatttagataccacttataagtgagaatgtatagcatttgactttctttcatccatctccagaactttctcatcttcccagcatgaaactgtccccatgaaacactcactccccagcaccctcccctgctcctggcatccaccagcctattttctgtttctatgaatctgttgacttgagggacctctgttgactcctaggagaggagtggaatcacacaggatttgtccttttgtgtctggcttatttcacttagcataatgtcttcagggttcatagatacaaggtcttgctctattacccagcctggagtgcagtggtgccattgcagaattcttgggatggtgtcacttttctggctgtaaacctctgtggctggtggcatctttgcctgagttttgctcaggcccactgggctcattctgcccacttgacctggcaggctacactcggctcttgctaccagcctggatcccacacctgccaagggtgtgccaggtgtggagtggcaaggggtgtgtgttcaagcaagcatggggtctagcccctgtgcacagtcagacacaccggctgctgcagcagggtgagcagctccaggtgccggcatgggcactggctctctgcaaggctgcggcttggccaggtgcaccacaagtagcgtccatggctgccaccagggaccatggtggagcccagaagcttnnnnnnnnnnnnnnnnnnnnnnnnnnnnnnnnnnnnnnnnnnnnnnnnnnnnnnnnnnnnnnnnnnnnnnnnnnnnnnnnnnnnnnnnnnnnnnnnnnnngtaaggggaggggaggggaatgtactgggcacggtggctcacacctgtaatcccag

SEQ ID NO: 2070 - protein, 291 aa, Homo sapiens
MPSIFAYQSSEVDWCESNFQYSELVAEFYNTFSNIPFFIFGPLMMLLMHPYAQKRSRYIYVVWVLFMIIGLFSMYFHMTLSFLGQLLDEIAILWLLGSGYSIWMPRCYFPSFLGGNRSQFIRLVFITTVVSTLLSFLRPTVNAYALNSIALHILYIVCQEYRKTSNKELRHLIEVSVVLWAVALTSWISDRLLCSFWQRIHFFYLHSIWHVLISITFPYGMVTMALVDANYEMPGETLKVRYWPRDSWPVGLPYVEIRVRHTGCCSRVSSSRCRHGHWLSARLRLGQVHHK
